(19) United States
(12) Patent Application Publication
(10) Pub. No.: US 2024/0059798 A1
(43) Pub. Date: Feb. 22, 2024

(54) CONDITIONALLY ACTIVATED ANTIGEN BINDING POLYPEPTIDE COMPLEXES AND METHODS OF USE THEREOF

(71) Applicant: ModeX Therapeutics, Inc., NATICK, MA (US)

(72) Inventors: LING XU, NEWTON CENTER, MA (US); LAN WU, CHESTNUT HILL, MA (US); EDWARD SEUNG, MEDFORD, MA (US); ZHI-YONG YANG, NEWTON CENTER, MA (US); GARY J. NABEL, DELRAY BEACH, FL (US); ELIAS ZERHOUNI, FORT LAUDERDALE, FL (US); RONNIE R. WEI, WESTON, MA (US); HAO CHEN, ACTON, MA (US); MARK GRECI, NATICK, MA (US); NICHOLAS JONES, NATICK, MA (US)

(21) Appl. No.: 18/069,529

(22) Filed: Dec. 21, 2022

Related U.S. Application Data
(60) Provisional application No. 63/292,382, filed on Dec. 21, 2021.

(51) Int. Cl. C07K 16/46; A61P 35/00

(52) U.S. Cl. CPC C07K 16/468; A61P 35/00; C07K 2317/524; C07K 2317/526; C07K 2317/522; C07K 2317/31; C07K 2317/565

(57) ABSTRACT

Disclosed are antigen binding polypeptide complexes (e.g., antibodies and antigen binding fragments thereof) having certain structural features. Also disclosed are polynucleotides and vectors encoding such polypeptide complexes; cells, pharmaceutical compositions, and kits containing such polypeptide complexes; and methods of using such polypeptide complexes.

### CROSS REFERENCE TO RELATED APPLICATION

[0001] This application claims the priority benefit of U.S. Provisional Application No. 63/292,382, filed Dec. 21, 2021, which is incorporated herein by reference in its entirety.

### REFERENCE TO SEQUENCE LISTING SUBMITTED ELECTRONICALLY

[0002] The content of the electronically submitted sequence listing (Name: 4850_0070001_SequenceListing_ST26; Size: 1,326,349 bytes; and Date of Creation: Dec. 20, 2022) is herein incorporated by reference in its entirety.

### FIELD

[0003] The present disclosure relates to antigen binding polypeptide complexes (e.g., antibodies and antigen binding fragments thereof) having certain structural features. The present disclosure also relates to conditionally activated antigen binding polypeptide complexes (e.g., antibodies and antigen binding fragments thereof) having certain structural features. The present disclosure further relates to polynucleotides and vectors encoding such polypeptide complexes; cells, pharmaceutical compositions, and kits containing such polypeptide complexes; and methods of using such polypeptide complexes.

### BACKGROUND

[0004] Immunotherapy is the treatment of disease by activating or suppressing the immune system. In recent years, immunotherapy has become of great interest to researchers and clinicians, particularly in its promise to treat cancer and infectious disease. Therapeutic antibodies are an important type of immunotherapy. Therapeutic antibodies can be monospecific, meaning that they have specificity to one antigen or epitope. Therapeutic antibodies have also been engineered to have specificity for two different antigens or epitopes (i.e., bispecific antibodies) or for multiple different antigens or epitopes (trispecific antibodies, tetraspecific antibodies, etc.). In addition, monospecific, bispecific, and multispecific antibodies have been combined to form multi-targeting strategies to treat complex human diseases, such as cancer and infectious disease.

[0005] Cancer immunotherapy has seen tremendous progress in the past few decades. Recent developments include checkpoint inhibitors and T cell engagers. With the approval of blinatumomab in 2014, bispecific T cell engagers have become a very active field for next generation anti-cancer therapeutics. Bispecific T cell engagers are antibodies that recognize antigens expressed on target tumor cells and simultaneously engage the CD3 subunit of the T cell receptor on cytotoxic T cells, serving as an artificial immune synapse to mediate tumor cell lysis by the cytotoxic T cells.

[0006] While bispecific T cell engager antibodies show high anti-tumor potency, they are also associated with strong side effects, particularly the cytokine release syndrome (CRS) associated with on-target, off-tumor toxicity for solid tumor targets, which can limit the therapeutic potential of these antibodies. On-target, off-tumor toxicity occurs when bispecific T cell engager antibodies bind to cancer antigens expressed on cells found in normal, non-cancerous tissue in addition to cancer antigens expressed on cancerous cells, thereby recruiting cytotoxic T cells to normal tissue and causing damage to the normal tissue. Because few solid tumor antigens are exclusively specific to tumors, such toxicity poses a great challenge for cancer immunotherapy using bispecific T cell or natural killer (NK) cell engagers.

[0007] There is a need for bispecific or multispecific antigen binding polypeptide complexes that can bind specific target molecules or combinations of target molecules and activate cytotoxic T cells only when in close proximity to tumor cells or within the tumor microenvironment. There is a further need for bispecific or multispecific T cell engager antibodies that yield high efficacy with manageable adverse events (AD) and, at the same time, a wider therapeutic window and better tolerability.

### BRIEF SUMMARY

[0008] Provided herein is an antigen binding polypeptide complex comprising a first polypeptide, a second polypeptide, and a third polypeptide; wherein the first polypeptide has a structure represented by VL1-L1-VH1-L2-Fc; VH1-L1-VL1-L2-Fc; VH1-L3-VL1-L4-Fc; or VL1-L3-VH1-L4-Fc; wherein the second polypeptide has a structure represented by VH2-L5-VH3-L6-CH1-L7-Fc or VH3-L5-VH2-L6-CH1-L7-Fc; wherein the third polypeptide has a structure represented by VL2-L8-VL3-L9-CL or VL3-L8-VL2-L9-CL; wherein VL1 is a first immunoglobulin light chain variable region; VL2 is a second immunoglobulin light chain variable region; VL3 is a third immunoglobulin light chain variable region; VH1 is a first immunoglobulin heavy chain variable region; VH2 is a second immunoglobulin heavy chain variable region; VH3 is a third immunoglobulin heavy chain variable region; Fc is a region comprising an immunoglobulin heavy chain constant region 2 (CH2), an immunoglobulin heavy chain constant region 3 (CH3), and optionally, an immunoglobulin hinge; CH1 is an immunoglobulin heavy chain constant region 1; CL is an immunoglobulin light chain constant region; and L1-L9 are amino acid linkers.

[0009] Provided herein is an antigen binding polypeptide complex comprising a first polypeptide, a second polypeptide, a third polypeptide, and a fourth polypeptide; wherein the first polypeptide has a structure represented by VL1-L1-CL or VH1-L1-CL; wherein the second polypeptide has a structure represented by VH1-L2-CH1-L3-Fc or VL1-L2-CH1-L3-Fc; wherein the third polypeptide has a structure represented by VH2-L4-VH3-L5-CH1-L6-Fc or VH3-L4-VH2-L5-CH1-L6-Fc; wherein the fourth polypeptide has a structure represented by VL2-L7-VL3-L8-CL or VL3-L7-VL2-L8-CL; wherein VL1 is a first immunoglobulin light chain variable region; VL2 is a second immunoglobulin light chain variable region; VL3 is a third immunoglobulin light chain variable region; VH1 is a first immunoglobulin heavy chain variable region; VH2 is a second immunoglobulin heavy chain variable region; VH3 is a third immunoglobulin heavy chain variable region; Fc is a region comprising an immunoglobulin heavy chain constant region 2 (CH2), an immunoglobulin heavy chain constant region 3 (CH3), and optionally, an immunoglobulin hinge; CH1 is an immunoglobulin heavy chain constant region 1; CL is an immunoglobulin light chain constant region; and L1-L8 are amino acid linkers.

[0010] Provided herein is an antigen binding polypeptide complex comprising a first polypeptide, a second polypeptide, and a third polypeptide; wherein the first polypeptide has a structure represented by VL1-L1-VL2-L2-VH2-L3-VH1-L4-Fc; VL1-L1-VH2-L2-VL2-L3-VH1-L4-Fc; VH1-L5-VH2-L6-VL2-L7-VL1-L8-Fc; or VH1-L5-VL2-L6-VH2-L7-VL1-L8-Fc; wherein the second polypeptide has a structure represented by VH3-L9-VH4-L10-CH1-L11-Fc or VH4-L9-VH3-L10-CH1-L11-Fc; wherein the third polypeptide has a structure represented by VL3-L12-VL4-L13-CL or VL4-L12-VL3-L13-CL; wherein VL1 is a first immunoglobulin light chain variable region; VL2 is a second immunoglobulin light chain variable region; VL3 is a third immunoglobulin light chain variable region; VL4 is a fourth immunoglobulin light chain variable region; VH1 is a first immunoglobulin heavy chain variable region; VH2 is a second immunoglobulin heavy chain variable region; VH3 is a third immunoglobulin heavy chain variable region; VH4 is a fourth immunoglobulin heavy chain variable region; Fe is a region comprising an immunoglobulin heavy chain constant region 2 (CH2), an immunoglobulin heavy chain constant region 3 (CH3), and optionally, an immunoglobulin hinge; CH1 is an immunoglobulin heavy chain constant region 1; CL is an immunoglobulin light chain constant region; and L1-L13 are amino acid linkers.

[0011] Provided herein is an antigen binding polypeptide complex comprising a first polypeptide, a second polypeptide, and a third polypeptide; wherein the first polypeptide has a structure represented by VL1-L1-VL2-L2-VH2-L3-VH1-L4-Fc; VL1-L1-VH2-L2-VL2-L3-VH1-L4-Fc; VH1-L5-VH2-L6-VL2-L7-VL1-L8-Fc; or VH1-L5-VL2-L6-VH2-L7-VL1-L8-Fc; wherein the second polypeptide has a structure represented by VH3-L9-VH4-CH1-Fc; or VH4-L9-VH3-CH1-Fc; wherein the third polypeptide has a structure represented by VL3-L10-VL4-CL; or VL4-L10-VL3-CL; wherein VL1 is a first immunoglobulin light chain variable region; VL2 is a second immunoglobulin light chain variable region; VL3 is a third immunoglobulin light chain variable region; VL4 is a fourth immunoglobulin light chain variable region; VH1 is a first immunoglobulin heavy chain variable region; VH2 is a second immunoglobulin heavy chain variable region; VH3 is a third immunoglobulin heavy chain variable region; VH4 is a fourth immunoglobulin heavy chain variable region; Fc is a region comprising an immunoglobulin heavy chain constant region 2 (CH2), an immunoglobulin heavy chain constant region 3 (CH3), and optionally, an immunoglobulin hinge; CH1 is an immunoglobulin heavy chain constant region 1; CL is an immunoglobulin light chain constant region; and L1-L10 are amino acid linkers.

[0012] Provided herein is an antigen binding polypeptide complex comprising a first polypeptide and a second polypeptide; wherein the first polypeptide has a structure represented by VL1-L1-VL2-L2-VH2-L3-VH1-L4-Fc; VL1-L1-VH2-L2-VL2-L3-VH1-L4-Fc; VH1-L5-VH2-L6-VL2-L7-VL1-L8-Fc; or VH1-L5-VL2-L6-VH2-L7-VL1-L8-Fc; wherein the second polypeptide has a structure represented by VL3-L9-VL4-L10-VH4-L11-VH3-L12-Fc; VL3-L9-VH4-L10-VL4-L11-VH3-L12-Fc; VH3-L13-VH4-L14-VL4-L15-VL3-L16-Fc; or VH3-L13-VL4-L14-VH4-L15-VL3-L16-Fc; wherein VL1 is a first immunoglobulin light chain variable region that specifically binds to a tumor-associated antigen; VL2 is a second immunoglobulin light chain variable region that specifically binds to a tumor-associated antigen; VL3 is a third immunoglobulin light chain variable region that specifically binds to CD3; VL4 is a fourth immunoglobulin light chain variable region that specifically binds to a tumor-associated antigen; VH1 is a first immunoglobulin heavy chain variable region that specifically binds to a tumor-associated antigen; VH2 is a second immunoglobulin heavy chain variable region that specifically binds to a tumor-associated antigen; VH3 is a third immunoglobulin heavy chain variable region that specifically binds to CD3; VH4 is a fourth immunoglobulin heavy chain variable region that specifically binds to a tumor-associated antigen; Fc is a region comprising an immunoglobulin heavy chain constant region 2 (CH2), an immunoglobulin heavy chain constant region 3 (CH3), and optionally, an immunoglobulin hinge; and L1-L16 are amino acid linkers.

[0013] Provided herein is an antigen binding polypeptide complex comprising a first polypeptide and a second polypeptide; wherein the first polypeptide has a structure represented by VL1-L1-VL2-L2-VH2-L3-VH1-L4-CH1-L5-Fc; VL1-L1-VH2-L2-VL2-L3-VH1-L4-CH1-L10-Fc; VH1-L6-VH2-L7-VL2-L8-VL1-L9-CH1-L10-Fc; VH1-L6-VL2-L7-VH2-L8-VL1-L9-CH1-L10-Fc; VL1-L11-VL2-L12-VH2-L13-VH1-L14-CL-L15-Fc; VL1-L11-VH2-L12-VL2-L13-VH1-L14-CL-L15-Fc; VH1-L16-VH2-L17-VL2-L18-VL1-L19-CL-L20-Fc; VH1-L16-VL2-L17-VH2-L18-VL1-L19-CL-L20-Fc; VL1-L21-VL2-L22-VH2-L23-VH1-L24-CH1-L25-CL-L26-Fc; VL1-L21-VH2-L22-VL2-L23-VH1-L24-CH1-L25-CL-L26-Fc; VH1-L27-VH2-L28-VL2-L29-VL1-L30-CH1-L31-CL-L32-Fc; VH1-L27-VL2-L28-VH2-L29-VL1-L30-CH1-L31-CL-L32-Fc; VL1-L33-VL2-L34-VH2-L35-VH1-L36-CL-L37-CH1-L38-Fc; VL1-L33-VH2-L34-VL2-L35-VH1-L36-CL-L37-CH1-L38-Fc; VH1-L39-VH2-L40-VL2-L41-VL1-L42-CL-L43-CH1-L44-Fc; or VH1-L39-VL2-L40-VH2-L41-VL1-L42-CL-L43-CH1-L44-Fc; wherein the second polypeptide has a structure represented by VL3-L45-VL4-L46-VH4-L47-VH3-L48-CH1-L49-Fc; VL3-L45-VH4-L46-VL4-L47-VH3-L48-CH1-L49-Fc; VH3-L50-VH4-L51-VL4-L52-VL3-L53-CH1-L54-Fc; VH3-L50-VL4-L51-VH4-L52-VL3-L53-CH1-L54-Fc; VL3-L55-VL4-L56-VH4-L57-VH3-L58-CL-L59-Fc; VL3-L55-VH4-L56-VL4-L57-VH3-L58-CL-L59-Fc; VH3-L60-VH4-L61-VL4-L62-VL3-L63-CL-L64-Fc; VH3-L60-VL4-L61-VH4-L62-VL3-L63-CL-L64-Fc; VL3-L65-VL4-L66-VH4-L67-VH3-L68-CH1-L69-CL-L70-Fc; VL3-L65-VH4-L66-VL4-L67-VH3-L68-CH1-L69-CL-L70-Fc; VH3-L71-VH4-L72-VL4-L73-VL3-L74-CH1-L75-CL-L76-Fc; VH3-L71-VL4-L72-VH4-L73-VL3-L74-CH1-L75-CL-L76-Fc; VL3-L77-VL4-L78-VH4-L79-VH3-L80-CL-L81-CH1-L82-Fc; VL3-L77-VH4-L78-VL4-L79-VH3-L80-CL-L81-CH1-L82-Fc; VH3-L83-VH4-L84-VL4-L85-VL3-L86-CL-L87-CH1-L88-Fc; or VH3-L83-VL4-L84-VH4-L85-VL3-L86-CL-L87-CH1-L88-Fc; wherein VL1 is a first immunoglobulin light chain variable region that specifically binds to a tumor-associated antigen; VL2 is a second immunoglobulin light chain variable region that specifically binds to a tumor-associated antigen; VL3 is a third immunoglobulin light chain variable region that specifically binds to CD3; VL4 is a fourth immunoglobulin light chain variable region that specifically binds to a tumor-associated antigen; VH1 is a first immunoglobulin heavy chain variable region that specifically binds to a tumor-associated antigen; VH2 is a second immunoglobulin heavy chain variable region that specifically binds to a tumor-associated antigen; VH3 is a third immunoglobulin heavy chain variable region that specifically binds to CD3; VH4 is a fourth immunoglobulin heavy chain variable region that specifically binds to a tumor-associated antigen; Fc is a region comprising an immunoglobulin heavy chain constant region 2 (CH2), an immunoglobulin heavy chain constant region 3 (CH3), and optionally, an immunoglobulin hinge; CH1 is an immunoglobulin heavy chain constant region 1; CL is an immunoglobulin light chain constant region; and L1-L88 are amino acid linkers.

[0014] In some aspects, the one or more linkers L1-L88 has a length of from 0 amino acids to about 50 amino acids. In some aspects, the one or more linkers L1-L88 is non-immunogenic. In some aspects, the one or more linkers L1-L88 does not contain a consensus T cell epitope.

[0015] In some aspects, the one or more linkers L1-L88 is a cleavable linker. In some aspects, the cleavable linker is cleaved by a matrix metalloprotease (MMP), a type II transmembrane serine protease, or a MMP and a type II transmembrane serine protease. In some aspects, the MMP is MMP1, MMP2, MMP7, MMP8, MMP9, MMP13, or a combination thereof. In some aspects, the type II transmembrane serine protease is a matriptase, hepsin, or a combination thereof. In some aspects, the matriptase is matriptase 1, matriptase 2, matriptase 3, or a combination thereof. In some aspects, the cleavable linker is cleaved by urokinase or legumain.

[0016] In some aspects, the cleavable linker is GPAALV, GSGRKG, GPLGLTG, GPSGLVG, GLVGRKAG, GPAGLVG, GPAGLVSG, STRKAGG, ASTRKAG, or ASTRKAGG (SEQ ID NOs:22-31), or a sequence having at least 50%, at least 60%, at least 70%, at least 80%, at least 90%, or at least 95% identity to any one of SEQ ID NOs:22-31. In some aspects, the one or more of linkers L1-L88 comprise the amino acid sequence of g, a, gss, asg, ggssg, gssgs, gtvaa, asggs, astgg, ggsgs, asggsg, ggsgssg, ggsggssgss, sggsgssggs, ggsggsgsgggsasgsg, ggsggsgsggggsasgsg, gggssggggsggsgsggsgs, ggggsggsgsggggsasgsg, gggssggsgsggsgsggsgs, sggssggsgsggsgsggsgssg, gsgssggggsggsgsggsgssg, ggggsgsggsgggssggggsggggsggggsggggsggggs, ggggsggggsggggsggggsggggsggggsggggsggggs, ggggsgsggsgggssggggsggggsggggsggggsggggssss, or ggggsgsggsgggssggggsggggsggggsggggsggggssssgs (SEQ ID NOs:1-21) or any one of SEQ ID NOs:444, 567, 576 (GGS) and 607, or a sequence having at least 50%, at least 60%, at least 70%, at least 80%, at least 90%, or at least 95% identity to any one of SEQ ID NOs:1-21 or any one of SEQ ID NOs:444, 567, 576 (GGS) and 607.

[0017] In some aspects, one of VH1, VH2, VH3 or VH4 specifically binds to CD3. In some aspects, one of VL1, VL2, VL3 or VL4 specifically binds to CD3. In some aspects, VH1 and VL1, VH2 and VL2, VH3 and VL3, or VH4 and VL4 specifically binds to CD3.

[0018] In some aspects, the VH1, VH2, VH3 or VH4 that specifically binds to CD3 comprises a CDR1 comprising an amino acid sequence having at least 90% identity, at least 95% identity, or 100% identity to any one of SEQ ID NOs:32, 40, 96, 433, 524, 667, 703, 739, 767, 803. 839, 851 and 859; a CDR2 comprising an amino acid sequence having at least 90% identity, at least 95% identity, or 100% identity to any one of SEQ ID NOs:33, 41, 97, 434, 525, 668, 704, 740, 768, 804, 840, 852 and 860; and a CDR3 comprising an amino acid sequence having at least 90% identity, at least 95% identity, or 100% identity to any one of SEQ ID NOs:34, 42, 98, 435, 526, 669, 705, 741, 769, 805, 841, 853 and 861; and wherein the VL1, VL2, VL3 or VL4 that specifically binds to CD3 comprises a CDR1 comprising an amino acid sequence having at least 90% identity, at least 95% identity, or 100% identity to any one of SEQ ID NOs:35, 44, 99, 446, 456, 466, 476, 520, 663, 699, 735, 763, 799, 835, 855 and 863; a CDR2 comprising an amino acid sequence having at least 90% identity, at least 95% identity, or 100% identity to any one of SEQ ID NOs:36, 45, 100, 447 (DT), 457 (DT), 467 (DT), 477 (DT), 521, 664, 700, 736, 764, 800, 836, 856 and 864; and a CDR3 comprising an amino acid sequence having at least 90% identity, at least 95% identity, or 100% identity to any one of SEQ ID NOs:37, 46, 101, 448, 458, 468, 478, 522, 665, 701, 737, 765, 801, 837, 857 and 865. In some aspects, the VH1, VH2, VH3 or VH4 that specifically binds to CD3 comprises an amino acid sequence having at least 80%, at least 85%, at least 90%, at least 95%, or 100% identity to any one of SEQ ID NOs:38, 43, 102, 423, 432, 523, 666, 702, 738, 766, 802, 838, 850 and 858, and the VL1, VL2, VL3 or VL4 that specifically binds to CD3 comprises an amino acid sequence having at least 80%, at least 85%, at least 90%, at least 95%, or 100% identity to any one of SEQ ID NOs:39, 47, 103, 422, 445, 455, 465, 475, 519, 662, 698, 734, 762, 798, 834, 854 and 862.

[0019] In some aspects, one or more of VH1, VH2, VH3 or VH4 specifically binds to a tumor-associated antigen (TAA). In some aspects, one or more of VL1, VL2, VL3 or VL4 specifically binds to a TAA. In some aspects, VH1 and VL1, VH2 and VL2, VH3 and VL3, and/or VH4 and VL4 specifically binds to a TAA. In some aspects, the TAA is A2AR, APRIL, ATPDase, BAFF, BAFFR, BCMA, BlyS, BTK, BTLA, B7DC, B7H1, B7H2, B7H3, B7H4, B7H5, B7H6, B7H7, B7RP1, B7-4, C3, C5, CCL2, CCL3, CCL4, CCL5, CCL7, CCL8, CCL11, CCL15, CCL17, CCL19, CCL20, CCL21, CCL25, CCR3, CCR4, CD16A, CD19, CD20, CD24, CD27, CD28, CD30, CD38, CD39, CD40, CD40L, CD47, CD52, CD70, CD80, CD86, CD123, CD133, CD137, CD137L, CD160, CD272, CEACAM5, CLEC9, CLEC91, CRTH2, CSF-1, CSF-2, CSF-3, CXCL1, CXCL2, CXCL4, CXCL12, CXCL13, CXCR3, cMet, CTLA4, DLL3, DLL4, DNGR-1, E-cadherin, EGFR, ENTPD1, EpCAM, FCER1, FCER1A, FCER2, FGFR, FLAP, FOLH1, Gi24, GITR, GITRL, GPR5, GP100, GPRC5D, HER2, HER3, ICOSL, ICOS, HHLA2, HMGB1, HVEM, IDO, IFNa, IgE, IGF1R, IL2Rbeta, IL1, ILIA, IL1B, IL1F10, IL2, IL4, IL4Ra, IL5, IL5R, IL6, IL7, IL7Ra, IL8, IL9, IL9R, IL10, rhILlO, IL12, IL13, IL13Ra1, IL13Ra2, IL15, IL17, IL17Rb, IL18, IL22, IL23, IL25, IL7, IL33, IL35, ITGB4, ITK, KIR, LAG3, LAMP1, leptin, LPFS2, MHC class II, MUC-1, MUC-16, NCR3LG1, NKG2D, NKp46, NTPDase-1, OX40, OX40L, PD-1, PD-L1, PD-L2, PROM1, S152, SIRPalpha, SISP1, SLC, SPG64, ST2, STEAP1, STEAP2, Syk kinase, STEAP1, TROP2, TACI, TDO, TGFbeta, T14, TIGIT, TIM3, TLR, TLR2, TLR4, TLR5, TLR9, TMEF1, TNFa, TNFRSF7, Tp55, TREM1, TSLP, TSLPR, TWEAK, VEGF, VISTA, Vstm3, or WUCAM, or a combination thereof. In some aspects, the TAA is CD19. In some aspects, the TAA is CD20. In some aspects, the TAA is cMet. In some aspects, the TAA is Trop2.

[0020] In some aspects, the one or more of VH1, VH2, VH3 or VH4 that specifically binds to a TAA comprises a CDR1 comprising an amino acid sequence having at least 90% identity, at least 95% identity, or 100% identity to any one of SEQ ID NOs:64, 72, 80, 88, 104, 112, 120, 128, 389, 409, 419, 429, 659, 695, 731, 397, 508, 540, 552, 757, 793, 829, 875, 500, 749, 785, 821, 649, 685, 775, 847, 625, 641, 677 and 713; a CDR2 comprising an amino acid sequence having at least 90% identity, at least 95% identity, or 100% identity to any one of SEQ ID NOs:65, 73, 81, 89, 105, 113, 121, 129, 390, 410, 420, 430, 660, 696, 732, 398, 509, 541, 553, 758, 794, 830, 876, 501, 750, 786, 822, 650, 686, 776, 848, 626, 642, 678 and 714; and a CDR3 comprising an amino acid sequence having at least 90% identity, at least 95% identity, or 100% identity to any one of SEQ ID NOs:66, 74, 82, 90, 106, 114, 122, 130, 391, 411, 421, 431, 661, 697, 733, 399, 510, 542, 554, 759, 795, 831, 877, 502, 751, 787, 823, 651, 687, 777, 849, 627, 643, 679 and 715; and wherein the one or more of VL1, VL2, VL3 or VL4 that specifically binds to a TAA comprises a CDR1 comprising an amino acid sequence having at least 90% identity, at least 95% identity, or 100% identity to any one of SEQ ID NOs:67, 75, 83, 91, 107, 115, 123, 131, 385, 405, 415, 441, 452, 462, 472, 655, 691, 727, 393, 486, 504, 536, 548, 753, 789, 825, 871, 879, 490, 496, 745, 781, 817, 645, 681, 771, 843, 621, 637, 673 and 709; a CDR2 comprising an amino acid sequence having at least 90% identity, at least 95% identity, or 100% identity to any one of SEQ ID NOs:68, 76, 84, 92, 108, 116, 124, 132, 386 (YTS); 406 (YTS), 416 (YTS), 442 (YTS), 453 (YTS), 463 (YTS), 473 (YTS), 656, 692, 728, 394, 487 (AT), 505 (AT), 537, 549, 754, 790, 826, 872, 880, 491 (DA), 497 (DA), 746, 782, 818, 646, 682, 772, 844, 622, 638, 674 and 710; and a CDR3 comprising an amino acid sequence having at least 90% identity, at least 95% identity, or 100% identity to any one of SEQ ID NOs:69, 77, 85, 93, 109, 117, 125, 133, 387, 407, 417, 443, 454, 464, 474, 657, 693, 729, 395, 488, 506, 538, 550, 755, 791, 827, 873, 881, 492, 498, 747, 783, 819, 647, 683, 773, 845, 623, 639, 675 and 711. In some aspects, the one or more of VH1, VH2, VH3 or VH4 that specifically binds to a TAA comprises an amino acid sequence having at least 80%, at least 85%, at least 90%, at least 95%, or 100% identity to any one of SEQ ID NOs:70, 78, 86, 94, 102, 110, 118, 126, 134, 388, 408, 418, 428, 584, 658, 694, 730, 396, 403, 507, 539, 551, 756, 792, 828, 883, 866, 874, 499, 544, 556, 748, 784, 820, 528, 648, 684, 774, 846, 624, 640, 676 and 712; and the one or more of VL1, VL2, VL3 or VL4 that specifically binds to a TAA comprises an amino acid sequence having at least 80%, at least 85%, at least 90%, at least 95%, or 100% identity to any one of SEQ ID NOs:71, 79, 87, 95, 103, 111, 119, 127, 135, 384, 404, 414, 440, 451, 461, 471, 583, 654, 690, 726, 392, 402, 485, 503, 535, 547, 752, 788, 824, 870, 878, 489, 495, 543, 555, 744, 780, 816, 882, 527, 644, 680, 770, 842, 620, 636, 672 and 708.

[0021] In some aspects, one or more of VH1, VH2, VH3 or VH4 specifically binds to an immune stimulating receptor. In some aspects, one or more of VL1, VL2, VL3 or VL4 specifically binds to an immune stimulating receptor. In some aspects, VH1 and VL1, VH2 and VL2, VH3 and VL3, and/or VH4 and VL4 specifically bind to an immune stimulating receptor. In some aspects, the immune stimulating receptor is CD28.

[0022] In some aspects, the VH1, VH2, VH3 or VH4 that specifically binds to an immune stimulating receptor comprises a CDR1 comprising an amino acid sequence having at least 90% identity, at least 95% identity, or 100% identity to any one of SEQ ID NOs:48, 56, 649, 685, 775 and 847; a CDR2 comprising an amino acid sequence having at least 90% identity, at least 95% identity, or 100% identity to any one of SEQ ID NOs:49, 57, 650, 686, 776 and 848; and a CDR3 comprising an amino acid sequence having at least 90% identity, at least 95% identity, or 100% identity to any one of SEQ ID NOs:50, 58, 651, 687, 777 and 849; and wherein the VL1, VL2, VL3 or VL4 that specifically binds to an immune stimulating receptor comprises a CDR1 comprising an amino acid sequence having at least 90% identity, at least 95% identity, or 100% identity to any one of SEQ ID NOs:51, 59, 645, 681, 771 and 843; a CDR2 comprising an amino acid sequence having at least 90% identity, at least 95% identity, or 100% identity to any one of SEQ ID NOs:52, 60, 646, 682, 772 and 844; and a CDR3 comprising an amino acid sequence having at least 90% identity, at least 95% identity, or 100% identity to any one of SEQ ID NOs:53, 61, 647, 683, 773 and 845. In some aspects, the VH1, VH2, VH3 or VH4 that specifically binds to an immune stimulating receptor comprises an amino acid sequence having at least 80%, at least 85%, at least 90%, at least 95%, or 100% identity to any one of SEQ ID NOs:54, 62, 528, 648, 684, 774 and 846, and the VL1, VL2, VL3 or VL4 that specifically binds to an immune stimulating receptor comprises an amino acid sequence having at least 80%, at least 85%, at least 90%, at least 95%, or 100% identity to any one of SEQ ID NOs:55, 63, 527, 644, 680, 770 and 842.

[0023] In some aspects, L5, L8, or L5 and L8 are cleavable linkers. In some aspects, L4, L7, or L4 and L7 are cleavable linkers. In some aspects, L9, L12, or L9 and L12 are cleavable linkers. In some aspects, VH3 and VL3 specifically bind to CD3. In some aspects, VH1 and VL1 and/or VH2 and VL2 specifically bind to a TAA. In some aspects, VH1 and VL1 or VH2 and VL2 specifically bind to CD28. In some aspects, VH4 and VL4 specifically bind to CD3. In some aspects, one or more of VH1 and VL1, VH2 and VL2, and VH3 and VL3 specifically bind to a TAA. In some aspects, VH1 and VL1 specifically bind to a TAA, VH2 and VL2 specifically bind to a TAA, and VH3 and VL3 specifically bind to CD28. In some aspects, VH1 and VL1 specifically bind to CD28, VH2 and VL2 specifically bind to a TAA, and VH3 and VL3 specifically bind to a TAA. In some aspects, VH1 and VL1 specifically bind to cMet, VH2 and VL2 specifically bind to Trop2, and VH3 and VL3 specifically bind to CD28. In some aspects, VH1 and VL1 specifically bind to Trop2, VH2 and VL2 specifically bind to cMet, and VH3 and VL3 specifically bind to CD28. In some aspects, VH1 and VL1 specifically bind to cMet, VH2 and VL2 specifically bind to CD28, and VH3 and VL3 specifically bind to Trop2. In some aspects, VH1 and VL1 specifically bind to CD28, VH2 and VL2 specifically bind to cMet, and VH3 and VL3 specifically bind to Trop2. In some aspects, VH1 and VL1 specifically bind to Trop2, VH2 and VL2 specifically bind to CD28, and VH3 and VL3 specifically bind to cMet. In some aspects, VH1 and VL1 specifically bind to CD28, VH2 and VL2 specifically bind to Trop2, and VH3 and VL3 specifically bind to cMet. In some aspects, VH1 and VL1 specifically bind to CD19, VH2 and VL2 specifically bind to CD20, and VH3 and VL3 specifically bind to CD28. In some aspects, VH1 and VL1 specifically bind to CD20, VH2 and VL2 specifically bind to CD19, and VH3 and VL3 specifically bind to CD28. In some aspects, VH1 and VL1 specifically bind to CD19, VH2 and VL2 specifically bind to CD28, and VH3 and VL3 specifically bind to CD20. In some aspects, VH1 and VL1 specifically bind to CD20, VH2 and VL2 specifically bind to CD28, and VH3 and VL3 specifically bind to CD19. In some aspects, VH1 and VL1 specifically bind to CD28, VH2 and VL2 specifically bind to CD19, and VH3 and VL3 specifically bind to CD20. In some aspects, VH1 and VL1 specifically bind to CD28, VH2 and VL2 specifically bind to CD20, and VH3 and VL3 specifically bind to CD19.

[0024] In some aspects, L1, L3, or L1 and L3 are cleavable linkers, or L5, L7, or L5 and L7 are cleavable linkers. In some aspects, L9, L11, or L9 and L11 are cleavable linkers, or L13, L15, or L13 and L15 are cleavable linkers. In some aspects, VH1 and VL1, VH2 and VL2, VH3 and VL3, or VH4 and VL4 specifically bind to CD3. In some aspects, one or more of VH1 and VL1, VH2 and VL2, VH3 and VL3, and VH4 and VL4 specifically bind to a TAA. In some aspects, VH1 and VL1, VH2 and VL2, VH3 and VL3, or VH4 and VL4 specifically bind to CD28.

[0025] In some aspects, an antigen binding polypeptide complex described herein is an antibody or antigen binding fragment thereof.

[0026] In some aspects, the immunoglobulin hinge comprises an upper hinge region, a middle hinge region, a lower hinge region, or a combination thereof.

[0027] In some aspects, the Fc region comprises at least one knob-into-hole modification. In some aspects, the antigen binding polypeptide complex is an IgG1 or IgG4 antibody and the knob-into-hole modification comprises (i) knob substitutions of S354C and T366W and hole substitutions of Y349C, T366S, L368A and Y407V; (ii) hole substitutions of L234A, L235A and P329A; (iii) hole substitutions of L234A and L235A; (iv) hole substitutions of M428L and N433 S; (v) hole substitutions of M252Y, S254T and T256E; or (vi) a combination thereof, based on the EU numbering scheme.

[0028] Also provided herein is an antibody or antigen binding fragment thereof comprising an antigen binding polypeptide complex described herein.

[0029] Also provided herein is a pharmaceutical composition comprising an antigen binding polypeptide complex described herein, or an antibody or antigen binding fragment thereof, and a pharmaceutically acceptable carrier.

[0030] Provided herein is a kit comprising an antigen binding polypeptide complex, an antibody or antigen binding fragment thereof, or a pharmaceutical composition described herein, and instructions for use.

[0031] Also provided herein are specified methods of use of an antigen binding polypeptide complex, antibody or antigen binding fragment thereof, pharmaceutical composition or kit described herein, or a combination thereof. Provided herein is a method for treating cancer comprising administering to a subject in need thereof an antigen binding polypeptide complex, an antibody or antigen binding fragment thereof, or a pharmaceutical composition described herein. In some aspects, the cancer is a solid cancer. In some aspects, the cancer is breast cancer, lung cancer, gastric cancer, prostate cancer, cervical cancer, urothelial cancer, or pancreatic cancer. In some aspects, the cancer is a hematological cancer. In some aspects, the hematological cancer is leukemia or lymphoma. In some aspects, the leukemia or lymphoma is B cell leukemia, B cell lymphoma, diffuse large B-cell lymphoma (DLBCL) Follicular lymphoma, Chronic lymphocytic leukemia (CLL)/small lymphocytic lymphoma (SLL), Mantle cell lymphoma (MCL), Burkitt lymphoma, Lymphoplasmacytic lymphoma (Waldenstrom macroglobulinemia), prolymphocytic leukemia (PLL), or hairy cell leukemia (HCL).

### BRIEF DESCRIPTION OF THE DRAWINGS

[0032] FIG. 1A depicts configurations of masked trispecific T cell engagers. Fv1-Fv2 are against tumor associated antigens (TAAs) or immune costimulatory receptors. The third Fv targets CD3.

[0033] FIG. 1B depicts a configuration of masked tetraspecific T cell engagers. Fv1-Fv3 are against tumor associated antigens (TAAs) or immune costimulatory receptors. The fourth Fv targets CD3.

[0034] FIG. 2 shows SDS-PAGE results of in vitro cleavage of exemplary masked tetraspecific molecules as depicted. Molecules were treated with either MTP or MMP9 protease as specified.

[0035] FIG. 3 shows ELISA binding results of exemplary masked tetraspecific molecules as depicted in FIG. 2, or negative isotype (Control IgG1), with or without protease treatment. Molecules cleaved or not cleaved by MTP or MMP9 as specified were tested for binding affinity to Trop2 and cMet.

[0036] FIG. 4 shows ELISA binding results of exemplary masked tetraspecific molecules as depicted in FIG. 2, or negative isotype (Control IgG1), with or without protease treatment. Molecules cleaved or not cleaved by MTP or MMP9 as specified were tested for binding affinity to CD28.

[0037] FIG. 5 shows ELISA binding results of exemplary masked tetraspecific molecules as depicted in FIG. 2, or negative isotype (Control IgG1), with or without protease treatment. Molecules cleaved or not cleaved by MTP or MMP9 as specified were tested for binding affinity to CD3.

[0038] FIG. 6 shows cytolysis of HCC1954 tumor cells by peripheral blood mononuclear cells PBMCs) (E:T:10:1) mediated by exemplary masked tetraspecific molecules as depicted in FIG. 2, or negative isotype (Control IgG1), from PBMCs of two donors (KP63250 and KP63251).

[0039] FIG. 7 shows ELISA binding results of exemplary non-masked tetraspecific molecules as depicted, or negative isotype (hIgG1LALPA) control, to their respective targets of hTrop2, hcMet, hCD28, and hCD3.

[0040] FIG. 8 shows CD69+ activation by exemplary non-masked tetraspecific molecules, or negative isotype (IgG1LALPA) control, of CD2+ T cells from PBMCs of two different donors.

[0041] FIG. 9 shows ELISA binding results (OD650) of MX612 and MX613 to their targets hTrop2, hcMet, hCD28, and hCD3. Results from a control antibody (control IgG), which does not bind these targets, is also shown.

[0042] FIG. 10 shows simultaneous co-binding of MX612 to its targets hTrop2, hcMet, hCD28, and hCD3, measured by biolayer-interferometry.

[0043] FIG. 11 shows simultaneous co-binding of MX446 to its targets hTrop2, hcMet, hCD28, and hCD3, measured by biolayer-interferometry.

[0044] FIG. 12 shows the ability of exemplary non-masked tetraspecific molecules to activate CD4+ and CD8+ T cells (CD69+). Results from PBMCs from six different donors in the absence of target tumor cells and following treatment with 1 nM MX446 and MX612 are shown. Results from a negative control (isotype IgG1LALPA; “−Ctl”) and positive control (CD3+CD28 mAbs; “+Ctl”) are also shown.

[0045] FIG. 13A-13B shows the ability of exemplary non-masked tetraspecific molecules to initiate release of the cytokines IL-2, IFN-gamma, IL-6 and TNFalpha. Results from PBMCs from six different donors in the absence of target tumor cells and following treatment with 1 nM MX446 and MX612 are shown. Results from a negative control (isotype IgG1LALPA; “−Ctl”) and positive control (CD3+CD28 mAbs; “+Ctl”) are also shown.

[0046] FIG. 14A-14B shows the ability of exemplary non-masked tetraspecific molecules to initiate release of the cytokines IL-2, IFN-gamma, IL-6 and TNFalpha. Results from PBMCs from six different donors in the presence of HCC1954 tumor cells and following treatment with 62.5 pM MX446 and MX612 are shown. Results from a negative control (isotype IgG1LALPA; “−Ctl”) are also shown.

[0047] FIG. 15A-15B shows the ability of exemplary non-masked tetraspecific molecules to initiate release of the cytokines IL-2, IFN-gamma, IL-6 and TNFalpha. Results from PBMCs from six different donors in the presence of BT20 tumor cells and following treatment with 62.5 pM MX446 and MX612 are shown. Results from a negative control (isotype IgG1LALPA; “−Ctl”) are also shown.

[0048] FIG. 16A-16B shows cytolysis of tumor cell lines by exemplary non-masked tetraspecific molecules or a negative control from PBMCs (E:T 5:1). HCC1954, BT-20, HCC1143 and HCC70 breast cancer cells, PC3 and DU145 prostate cancer cells, and Hs746T and N87 gastric cancer cells were used. Percent lysis of cells following treatment with MX446 and MX612, and EC50 values in pM are shown. Results from a negative control (isotype IgG1LALAPA) are also shown.

[0049] FIG. 17 summarizes cytolysis potencies of various tumor cell lines mediated by exemplary non-masked tetraspecific molecules.

[0050] FIG. 18A-18C shows binding of exemplary non-masked tetraspecific molecules to their targets hTrop2, hcMet, hCD28, and hCD3, measured by biolayer-interferometry. Results are shown for cells treated with MX974 (FIG. 18A), MX975 (FIG. 18B) and MX976 (FIG. 18C).

[0051] FIG. 19 shows in vitro cytolysis of HCC1954 tumor cells by exemplary non-masked tetraspecific molecules. Cytolysis mediated by MX974, MX975 and MX976 or a negative control from PBMCs (E:T: 5:1) was measured from a representative donor after 48 and 72 hours of incubation at 37° C. Results are shown as percent lysis of cells with increasing concentration of antibody. Results from a negative control (hIgG1LALAPA) are also shown.

[0052] FIG. 20 shows activation of CD4+ and CD8+ T cells (CD69+) from PBMCs by exemplary masked tetraspecific molecules. Results are shown as the percentage of CD69+ cells from six donors in the absence of target tumor cells, following treatment with MX444 or MX634 at 1 nM. Results from a negative control (isotype IgG1LALPA; “−Ctl”) and a positive control (CD3+CD28 mAbs; “+Ctl”) are also shown.

[0053] FIG. 21A-21B shows the ability of exemplary non-masked tetraspecific molecules to initiate release of the cytokines IL-2, IFN-gamma, IL-6 and TNFalpha. Results from PBMCs from six different donors in the absence of target tumor cells and following treatment with 1 nM MX444 and MX634 are shown. Results from a negative control (isotype IgG1LALPA; “−Ctl”) and positive control (CD3+CD28 mAbs; “+Ctl”) are also shown.

[0054] FIG. 22A-22B shows the ability of exemplary non-masked tetraspecific molecules to initiate release of the cytokines IL-2, IFN-gamma, IL-6 and TNFalpha. Results from PBMCs from six different donors in the absence of target tumor cells and following treatment with 1 nM MX444 and MX634 are shown. Results from a negative control (isotype IgG1LALPA; “−Ctl”) and positive control (CD3+CD28 mAbs; “+Ctl”) are also shown.

[0055] FIG. 23A-23B shows the ability of exemplary non-masked tetraspecific molecules to initiate release of the cytokines IL-2, IFN-gamma, IL-6 and TNFalpha. Results from PBMCs from six different donors in the presence of HCC1954 tumor cells and following treatment with 62.5 pM MX444 and MX634 are shown. Results from a negative control (isotype IgG1LALPA; “−Ctl”) are also shown.

[0056] FIG. 24A-24B shows the ability of exemplary non-masked tetraspecific molecules to initiate release of the cytokines IL-2, IFN-gamma, IL-6 and TNFalpha. Results from PBMCs from six different donors in the presence of BT20 tumor cells and following treatment with 62.5 pM MX444 and MX634 are shown. Results from a negative control (isotype IgG1LALPA; “−Ctl”) are also shown.

[0057] FIG. 25 summarizes cytolysis potencies of various tumor cell lines mediated by exemplary non-masked tetraspecific molecules.

[0058] FIG. 26 shows the structures of MX433, MX434, MX435 and MX436.

[0059] FIG. 27 shows the ability of exemplary non-masked tetraspecific molecules MX433, MX434, MX435 and MX436 to bind to their targets, as tested by ELISA. Binding results to hCD19, hCD28 and hCD3 are shown. Results from a negative control (hIgG1LALPA) are also shown.

[0060] FIG. 28 shows the structures of MX647, MX648, MX685 and MX686.

[0061] FIG. 29 shows the ability of exemplary non-masked tetraspecific molecules MX647, MX648, MX685 and MX686 to bind to their targets, as tested by ELISA. Binding results to hCD19, hCD28 and hCD3 are shown.

[0062] FIG. 30 shows surface staining of exemplary non-masked tetraspecific molecules to hCD20-expressing Epi293 cells. The molecules tested were MX647, MX789, MX788, MX787, MX786, MX685, MX793, MX792, MX791 and MX790. Staining with a negative control (hIgG1LALPA) is also shown.

[0063] FIG. 31 shows the structures of MX647, MX648, MX685, MX786 and MX790.

[0064] FIG. 32 shows ability of exemplary non-masked tetraspecific molecules to activate T cells (CD69+). The molecules tested were MX647, MX648, MX685, MX786 and MX790. The percentage of CD69+ cells from PBMCs of a representative donor in the absence of tumor cells and following treatment with MX647, MX648, MX685, MX786 and MX790 are shown. EC50 values in pM and results from a negative control (hIgG1LALAPA) are also shown.

[0065] FIG. 33 shows the measurement of cytolysis mediated by MX647, MX648, MX685, MX786 and MX790 or a negative control (hIgG1LALAPA) from PBMCs (E:T: 5:1). Results are shown as percent lysis with increasing concentration of antibody. EC50 in pM and Rmax values are also shown.

[0066] FIG. 34 shows cytokine release from PBMCs from a representative donor in the absence of target tumor cells and following treatment with 8 pM or 40 pM MX647, MX648, MX685, MX786 and MX790. Results from a negative control (hIgG1LALPA) are also shown.

[0067] FIG. 35 shows cytokine release from PBMCs from a representative donor in the presence of Z-138 tumor cells and following treatment with 8 pM or 40 pM MX647, MX648, MX685, MX786 and MX790. Results from a negative control (hIgG1LALAPA) are also shown.

[0068] FIG. 36 shows surface staining of exemplary trispecific molecules MX848, MX856 and MX857 to hCD20-expressing Epi293 cells. Staining with a negative control (control) is also shown.

[0069] FIG. 37 shows in vitro cytolysis of Z-138 tumor cells mediated by MX857 or a negative control (hIgG1LALAPA) from PBMCs from two representative donors (E:T: 3:1). Results are shown as percent lysis of cells with increasing concentration of antibody.

[0070] FIG. 38 shows surface staining of 12.5 nM MX846, MX854 and MX855 to hCD20-expressing Epi293 cells. Staining with a negative control (control) is also shown.

[0071] FIG. 39A-39B shows surface staining of 12.5 nM MX850, MX851, MX852 and MX853 to hCD20-expressing Epi293 cells. Staining with a negative control (control) is also shown.

[0072] FIG. 40 shows in vitro cytolysis of Z-138 tumor cells mediated by MX855. Results are shown as percent lysis of cells with increasing concentration of antibody.

[0073] FIG. 41A-41B show binding of MX977 and MX978 to their targets CD20, CD19, CD28 and CD3 by biolayer-interferometry.

[0074] FIG. 42 shows surface staining of 12.5 nM MX977 and MX978 to hCD20-expressing Epi293 cells. Staining with a negative control (hIgGLALAPA) is also shown.

[0075] FIG. 43 shows in vitro cytolysis of Toledo tumor cells mediated by MX977, MX978 or a negative control (hIgG1LALAPA) from PBMCs from a representative donor (E:T: 5:1). Results are shown as percent lysis of cells with increasing concentration of antibody.

### DETAILED DESCRIPTION OF THE INVENTION

[0076] The invention is directed to antigen binding polypeptide complexes (e.g., antibodies or antigen binding fragments thereof) having improved features. In some aspects, the invention enables the generation of multispecific and multifunctional antigen binding polypeptide complexes through the expression of complementary self-assembling heavy and light chains expressed with a single polypeptide per arm and, optionally, with the addition of specific amino acid linkers. Because of this multifunctionality, antigen binding polypeptide complexes of the invention can bind to specific combinations of target molecules for selectivity or breadth/neutralization, bring together two or more cell types, bring together targets and deliver activation signals, modify the disease microenvironment, and enhance avidity of binding for improved potency.

[0077] Various terms relating to aspects of disclosure are used throughout the specification and claims. Such terms are to be given their ordinary meaning in the art, unless otherwise indicated. Other specifically defined terms are to be construed in a manner consistent with the definition provided herein.

### Definitions

[0078] As used herein, the term “antigen binding polypeptide complex” refers to a group of two, three, four, or more associated polypeptides, wherein at least one polypeptide has the ability to specifically bind to one or more antigens. An antigen binding polypeptide complex, includes, but is not limited to, an antibody or antigen binding fragment thereof.

[0079] The term “antibody” includes, without limitation, a glycoprotein immunoglobulin which binds specifically to an antigen and comprises at least two heavy (H) chains and two light (L) chains interconnected by disulfide bonds. Each H chain comprises a heavy chain variable region (abbreviated herein as VH) and a heavy chain constant region. The heavy chain constant region comprises three constant domains, CH1, CH2 and CH3. Each L chain comprises a light chain variable region (abbreviated herein as VL) and a light chain constant region. The light chain constant region comprises one constant domain, CL. The VH and VL regions can be further subdivided into regions of hypervariability, termed complementarity determining regions (CDRs), interspersed with regions that are more conserved, termed framework regions (FR). Each VH and VL comprises three CDRs and four FRs, arranged from amino-terminus to carboxy-terminus in the following order: FR1, CDR1, FR2, CDR2, FR3, CDR3, FR4. The variable regions of the heavy and light chains contain a binding domain that interacts with an antigen. The constant regions of the antibodies may mediate the binding of the immunoglobulin to host tissues or factors, including various cells of the immune system (e.g., effector cells) and the first component (C1q) of the classical complement system. A heavy chain may have the C-terminal lysine or not. Unless specified otherwise herein, the amino acids in the variable regions are numbered using the Kabat numbering system and those in the constant regions are numbered using the EU system.

[0080] The term “monoclonal antibody,” as used herein, refers to an antibody that is produced by a single clone of B-cells and binds to the same epitope. In contrast, the term “polyclonal antibody” refers to a population of antibodies that are produced by different B-cells and bind to different epitopes of the same antigen. The term “antibody” includes, by way of example, monoclonal and polyclonal antibodies; chimeric and humanized antibodies; human or non-human antibodies; wholly synthetic antibodies; and single chain antibodies. A non-human antibody can be humanized by recombinant methods to reduce its immunogenicity in man.

[0081] The antibody can be an antibody that has been altered (e.g., by mutation, deletion, substitution, conjugation to a non-antibody moiety). For example, an antibody can include one or more variant amino acids (compared to a naturally occurring antibody) which change a property (e.g., a functional property) of the antibody. For example, several such alterations are known in the art, which affect, e.g., half-life, effector function, and/or immune responses to the antibody in a patient. The term antibody also includes artificial polypeptide constructs, which comprise at least one antibody-derived antigen binding site.

[0082] An “antigen binding fragment” refers to one or more fragments or portions of an antibody that retain the ability to bind specifically to the antigen bound by the whole antibody. It has been shown that the antigen binding function of an antibody can be performed by fragments or portions of a full-length antibody. An antigen binding fragment can contain the antigenic determining regions of an intact antibody (e.g., the complementarity determining regions (CDRs)). Examples of antigen binding fragments of antibodies include, but are not limited to, Fab, Fab′, F(ab′)₂, and Fv fragments, linear antibodies, and single chain antibodies. An antigen binding fragment of an antibody can be derived from any animal species, such as rodents (e.g., mouse, rat, or hamster) and humans or can be artificially produced.

[0083] Furthermore, although the two domains of the Fv fragment, VL and VH, are coded for by separate genes, they can be joined, using recombinant methods, by a synthetic linker that enables them to be made as a single protein chain in which the VL and VH regions pair to form monovalent molecules (known as single chain Fv (scFv); see, e.g., Bird et al. (1988) Science 242:423-426; and Huston et al. (1988) Proc. Natl. Acad. Sci. USA 85:5879-5883). Such single chain antibodies are also intended to be encompassed within the term “antigen-binding fragment” of an antibody.

[0084] Antigen binding fragments are obtained using conventional techniques known to those with skill in the art, and the fragments are screened for utility in the same manner as are intact antibodies. Antigen binding fragments can be produced by recombinant DNA techniques, or by enzymatic or chemical cleavage of intact immunoglobulins.

[0085] As used herein, the term “variable region” typically refers to a portion of an antibody, generally, a portion of a light or heavy chain, typically about the amino-terminal 110 to 120 amino acids, or 110 to 125 amino acids in the mature heavy chain and about 90 to 115 amino acids in the mature light chain, which differ extensively in sequence among antibodies and are used in the binding and specificity of a particular antibody for its particular antigen. The variability in sequence is concentrated in those regions called complementarity determining regions (CDRs) while the more highly conserved regions in the variable domain are called framework regions (FR). Without wishing to be bound by any particular mechanism or theory, it is believed that the CDRs of the light and heavy chains are primarily responsible for the interaction and specificity of an antibody with antigen. In some aspects, the variable region is a mammalian variable region, e.g., a human, mouse or rabbit variable region. In some aspects, the variable region comprises rodent or murine CDRs and human framework regions (FRs). In some aspects, the variable region is a primate (e.g., non-human primate) variable region. In some aspects, the variable region comprises rodent or murine CDRs and primate (e.g., non-human primate) framework regions (FRs).

[0086] The terms “complementarity determining region” or “CDR”, as used herein, refer to each of the regions of an antibody variable domain which are hypervariable in sequence and/or form structurally defined loops (hypervariable loops) and/or contain the antigen-contacting residues. Antibodies can comprise six CDRs, e.g., three in the VH and three in the VL.

[0087] The terms “VL”, “VL region,” and “VL domain” are used herein interchangeably to refer to the light chain variable region of an antigen binding polypeptide complex, antibody or antigen binding fragment thereof. In some aspects, a VL region is referred to herein as VL1 to denote a first light chain variable region, VL2 to denote a second light chain variable region, VL3 to denote a third light chain variable region, and so on. An enumerated VL region (e.g., VL1) can have the same or different antigen binding properties and/or the same or different sequence as another enumerated VL region (e.g., VL2).

[0088] The terms “VH”, “VH region,” and “VH domain” are used herein interchangeably to refer to the heavy chain variable region of an antigen binding polypeptide complex, antibody or antigen binding fragment thereof. In some aspects, a VH region is referred to herein as VH1 to denote a first heavy chain variable region, VH2 to denote a second heavy chain variable region, VH3 to denote a third heavy chain variable region, and so on. An enumerated VH region (e.g., VH1) can have the same or different antigen binding properties and/or the same or different sequence as another enumerated VH region (e.g., V12).

[0089]

| As used herein, “Kabat numbering” and like terms are recognized in the art and refer to a system of numbering amino acid residues in the heavy and light chain variable regions of an antibody or antigen binding fragment thereof. In some aspects, CDRs can be determined according to the Kabat numbering system (see, e.g., Kabat E A & Wu T T (1971) Ann NY Acad Sci 190: 382-391 and Kabat E A et al., (1991) Sequences of Proteins of Immunological Interest, Fifth Edition, U.S. Department of Health and Human Services, NIH Publication No. 91-3242). Using the Kabat numbering system, CDRs within an antibody heavy chain molecule are typically present at amino acid positions 31 to 35, which optionally can include one or two additional amino acids, following 35 (referred to in the Kabat numbering scheme as 35A and 35B) (CDR1), amino acid positions 50 to 65 (CDR2), and amino acid positions 95 to 102 (CDR3). Using the Kabat numbering system, CDRs within an antibody light chain molecule are typically present at amino acid positions 24 to 34 (CDR1), amino acid positions 50 to 56 (CDR2), and amino acid positions 89 to 97 (CDR3).

[0090] As used herein, the terms “constant region” or “constant domain” are used interchangeably to refer to a portion of an antigen binding polypeptide complex, antibody or antigen binding fragment thereof, e.g., a carboxyl terminal portion of a light and/or heavy chain which is not directly involved in binding of an antibody to antigen but which can exhibit various effector functions, such as interaction with the Fc region. The constant region generally has a more conserved amino acid sequence relative to a variable region. In some aspects, an antigen binding polypeptide complex, antibody or antigen binding fragment thereof comprises a constant region or portion thereof that is sufficient for antibody-dependent cell-mediated cytotoxicity (ADCC), antibody-dependent cellular phagocytosis (ADCP), and complement-dependent cytotoxicity (CDC).

[0091] As used herein, the terms “fragment crystallizable region,” “Fc region,” or “Fc domain” are used interchangeably herein to refer to the tail region of an antibody that interacts with cell surface receptors called Fc receptors and some proteins of the complement system. Fc regions typically comprise CH2 and CH3 regions, and, optionally, an immunoglobulin hinge.

[0092] As used herein, the terms “immunoglobulin hinge,” “hinge,” “hinge domain” or “hinge region” are used interchangeably to refer to a stretch of heavy chains between the Fab and Fc portions of an antigen binding polypeptide complex, antibody or antigen binding fragment thereof. A hinge provides structure, position and flexibility, which assist with normal functioning of antibodies (e.g., for crosslinking two antigens or binding two antigenic determinants on the same antigen molecule). An immunoglobulin hinge is divided into upper, middle and lower hinge regions that can be separated based on structural and/or genetic components. An immunoglobulin hinge of the invention can contain one, two or all three of these regions. Structurally, the upper hinge region stretches from the C terminal end of CH1 to the first hinge disulfide bond. The middle hinge region stretches from the first cysteine to the last cysteine in the hinge. The lower hinge region extends from the last cysteine to the glycine of CH2. The cysteines present in the hinge form interchain disulfide bonds that link the immunoglobulin monomers.

[0093] As used herein, the term “Fab” refers to a region of an antibody that binds to an antigen. It is typically composed of one constant and one variable domain of each of the heavy and the light chain.

[0094] As used herein, the term “heavy chain” refers to a portion of an antigen binding polypeptide complex, antibody or antigen binding fragment thereof typically composed of a heavy chain variable region (VH), a heavy chain constant region 1 (CH1), a heavy chain constant region 2 (CH2), and a heavy chain constant region 3 (CH3). A typical antibody is composed of two heavy chains and two light chains. When used in reference to an antibody, a heavy chain can refer to any distinct type, e.g., alpha (α), delta (δ), epsilon (ε), gamma (γ), and mu (μ), based on the amino acid sequence of the constant region, which gives rise to IgA, IgD, IgE, IgG, and IgM classes of antibodies, respectively, including subclasses of IgG, e.g., IgG1, IgG2, IgG3, and IgG4. Heavy chain amino acid sequences are known in the art. In some aspects, the heavy chain is a human heavy chain.

[0095] As used herein, the term “light chain” refers to a portion of an antigen binding polypeptide complex, antibody or antigen binding fragment thereof typically composed of a light chain variable region (VL) and a light chain constant region (CL). A typical antibody is composed of two light chains and two heavy chains. When used in reference to an antibody, a light chain can refer to any distinct type, e.g., kappa (κ) or lambda (λ), based on the amino acid sequence of the constant region. Light chain amino acid sequences are known in the art. In some aspects, the light chain is a human light chain.

[0096] The term “chimeric” antibody or antigen binding fragment thereof refers to an antibody or antigen binding fragments thereof wherein the amino acid sequence is derived from two or more species. Typically, the variable region of both light and heavy chains corresponds to the variable region of antibodies or antigen binding fragments thereof derived from one species of mammals (e.g., mouse, rat, rabbit, etc.) with the desired specificity, affinity and capability, while the constant regions are homologous to the sequences in antibodies or antigen binding fragments thereof derived from another (usually human) to avoid eliciting an immune response in that species.

[0097] The term “humanized” antibody or antigen binding fragment thereof refers to forms of non-human (e.g., murine) antibodies or antigen binding fragments that are specific immunoglobulin chains, chimeric immunoglobulins, or fragments thereof that contain minimal non-human (e.g., murine) sequences. Typically, humanized antibodies or antigen binding fragments thereof are human immunoglobulins in which residues from a complementary determining region (CDR) are replaced by residues from a CDR of a non-human species (e.g., mouse, rat, rabbit, hamster) that have the desired specificity, affinity, and capability (Jones et al., Nature 321:522-525 (1986); Riechmann et al., Nature 332:323-327 (1988); Verhoeyen et al., Science 239:1534-1536 (1988)). In some aspects, the Fv framework region (FR) residues of a human immunoglobulin are replaced with the corresponding residues in an antibody or fragment from a non-human species that has the desired specificity, affinity, and capability. The humanized antibody or antigen binding fragment thereof can be further modified by the substitution of additional residues either in the Fv framework region and/or within the replaced non-human residues to refine and optimize antibody or antigen-binding fragment thereof specificity, affinity, and/or capability. In general, a humanized antibody or antigen binding fragment thereof will comprise substantially all of at least one, and typically two or three, variable domains containing all or substantially all of the CDR regions that correspond to the non-human immunoglobulin whereas all or substantially all of the FR regions are those of a human immunoglobulin consensus sequence. A humanized antibody or antigen binding fragment thereof can also comprise at least a portion of a constant region, typically that of a human immunoglobulin. Examples of methods used to generate humanized antibodies are known and described, for example, in U.S. Pat. No. 5,225,539; Roguska et al., Proc. Natl. Acad. Sci., USA, 91(3):969-973 (1994), and Roguska et al., Protein Eng. 9(10):895-904 (1996).

[0098] The term “human” antibody or antigen binding fragment thereof, as used herein, means an antibody or antigen binding fragment thereof having an amino acid sequence derived from a human immunoglobulin gene locus, where such antibody or antigen binding fragment is made using recombinant techniques known in the art. This definition of a human antibody or antigen binding fragment thereof includes intact or full-length antibodies and fragments thereof.

[0099] A polypeptide complex, antibody, antigen binding fragment thereof, polynucleotide, vector, or cell which is “isolated” is a polypeptide complex, antibody, antigen binding fragment thereof, polynucleotide, vector, or cell which is in a form not found in nature. Isolated polypeptide complexes, antibodies, antigen binding fragments thereof, polynucleotides, vectors, or cells include those which have been purified to a degree that they are no longer in a form in which they are found in nature. In some aspects, a polypeptide complex, antibody, antigen binding fragment thereof, polynucleotide, vector, or cell which is isolated is substantially pure. As used herein, “substantially pure” refers to material which is at least 50% pure (i.e., free from contaminants), at least 90% pure, at least 95% pure, at least 98% pure, or at least 99% pure.

[0100] The terms “polypeptide,” “peptide,” and “protein” are used interchangeably herein to refer to polymers of amino acids of any length. The polymer can be linear or branched, it can comprise modified amino acids, and it can be interrupted by non-amino acids. The terms also encompass an amino acid polymer that has been modified naturally or by intervention; for example, disulfide bond formation, glycosylation, lipidation, acetylation, phosphorylation, or any other manipulation or modification, such as conjugation with a labeling component. Also included within the definition are, for example, polypeptides containing one or more analogs of an amino acid (including, for example, unnatural amino acids, etc.), as well as other modifications known in the art. It is understood that, because the polypeptides of this invention are based upon antibodies, in some aspects, the polypeptides can occur as single chains or associated chains.

[0101]

| The use of the alternative (e.g., “or”) should be understood to mean either one, both, or any combination thereof of the alternatives. As used herein, the indefinite articles “a” or “an” should be understood to refer to “one or more” of any recited or enumerated component.

[0102] As used herein, the term “and/or” is to be taken as specific disclosure of each of the two specified features or components with or without the other. Thus, the term “and/or” as used in a phrase such as “A and/or B” herein is intended to include “A and B,” “A or B,” “A” (alone), and “B” (alone). Likewise, the term “and/or” as used in a phrase such as “A, B, and/or C” is intended to encompass each of the following aspects: A, B, and C; A, B, or C; A or C; A or B; B or C; A and C; A and B; B and C; A (alone); B (alone); and C (alone).

[0103] It is understood that wherever aspects are described herein with the language “comprising,” “having” and the like, otherwise analogous aspects described in terms of “consisting of” and/or “consisting essentially of” are also provided.

[0104] As used herein, the term “about” refers to a value or composition that is within an acceptable error range for the particular value or composition as determined by one of ordinary skill in the art, which will depend in part on how the value or composition is measured or determined, i.e., the limitations of the measurement system. For example, “about” can mean within 1 or more than 1 standard deviation per the practice in the art. Alternatively, “about” can mean a range of up to 10% or 20% (i.e., ±10% or 20%). For example, about 3 mg can include any number between 2.7 mg and 3.3 mg (for 10%) or between 2.4 mg and 3.6 mg (for 20%). Furthermore, particularly with respect to biological systems or processes, the terms can mean up to an order of magnitude or up to 5-fold of a value. When particular values or compositions are provided in the application and claims, unless otherwise stated, the meaning of “about” should be assumed to be within an acceptable error range for that particular value or composition.

[0105] As described herein, any numerical range, concentration range, percentage range, ratio range or integer range is to be understood to include the value of any integer within the recited range and, when appropriate, fractions thereof (such as one-tenth and one-hundredth of an integer), unless otherwise indicated.

[0106] Unless defined otherwise, all technical and scientific terms used herein have the same meaning as commonly understood by one of ordinary skill in the art to which this disclosure is related. For example, the Concise Dictionary of Biomedicine and Molecular Biology, Juo, Pei-Show, 2nd ed., 2002, CRC Press; The Dictionary of Cell and Molecular Biology, 5th ed., 2013, Academic Press; and the Oxford Dictionary Of Biochemistry And Molecular Biology, 2006, Oxford University Press, provide one of skill with a general dictionary of many of the terms used in this disclosure.

[0107] Units, prefixes, and symbols are denoted in their Système International de Unites (SI) accepted form. Numeric ranges are inclusive of the numbers defining the range. The headings provided herein are not limitations of the various aspects of the disclosure, which can be had by reference to the specification as a whole. Accordingly, the terms defined herein are more fully defined by reference to the specification in its entirety.

[0108] Various aspects are described in further detail in the following sections.

### Antigen Binding Polypeptide Complexes

[0109] In some aspects, the invention is directed to antigen binding polypeptide complexes having certain structural features described further herein. In some aspects, an antigen binding polypeptide complex of the invention (e.g., antibody or antigen binding fragment thereof) comprises one or more cleavable linkers, as described further herein. In some aspects, an antigen binding polypeptide complex of the invention (e.g., antibody or antigen binding fragment thereof) comprises an interferon alpha, as described further herein.

[0110] In some aspects, an antigen binding polypeptide complex of the invention (e.g., antibody or antigen binding fragment thereof) contains a VH and/or VL that specifically binds to CD3. In some aspects, one of VH1, VH2, VH3 or VH4 of an antigen binding polypeptide described herein specifically binds to CD3. In some aspects, one of VL1, VL2, VL3 or VL4 of an antigen binding polypeptide described herein specifically binds to CD3. In some aspects, VH1 and VL1, VH2 and VL2, VH3 and VL3, or VH4 and VL4 of an antigen binding polypeptide described herein specifically binds to CD3.

[0111] In some aspects, the VH and/or VL that specifically binds to CD3 is masked by the interferon alpha and/or by another VH and/or VL that is joined to the VH and/or VL that specifically binds to CD3 by a cleavable linker.

[0112] In some aspects, VH1 and VH2 of an antigen binding polypeptide complex described herein are joined by a cleavable linker. In some aspects, VH1 and VL2 of an antigen binding polypeptide complex described herein are joined by a cleavable linker. In some aspects, VL1 and VH2 of an antigen binding polypeptide complex described herein are joined by a cleavable linker. In some aspects, VL1 and VL2 of an antigen binding polypeptide complex described herein are joined by a cleavable linker. In some aspects, VH1 and VH2 of an antigen binding polypeptide complex described herein are joined by a noncleavable linker having the amino acid sequence of GS (a GS linker). In some aspects, VH1 and VL2 of an antigen binding polypeptide complex described herein are joined by a GS linker. In some aspects, VL1 and VH2 of an antigen binding polypeptide complex described herein are joined by a GS linker. In some aspects, VL1 and VL2 of an antigen binding polypeptide complex described herein are joined by a GS linker.

[0113] In some aspects, VL2 and VL1 of an antigen binding polypeptide complex described herein are joined by a cleavable linker. In some aspects, VH2 and VL1 of an antigen binding polypeptide complex described herein are joined by a cleavable linker. In some aspects, VL2 and VH1 of an antigen binding polypeptide complex described herein are joined by a cleavable linker. In some aspects, VH2 and VH1 of an antigen binding polypeptide complex described herein are joined by a cleavable linker. In some aspects, VL2 and VL1 of an antigen binding polypeptide complex described herein are joined by a GS linker. In some aspects, VH2 and VL1 of an antigen binding polypeptide complex described herein are joined by a GS linker. In some aspects, VL2 and VH1 of an antigen binding polypeptide complex described herein are joined by a GS linker. In some aspects, VH2 and VH1 of an antigen binding polypeptide complex described herein are joined by a GS linker.

[0114] In some aspects, VH3 and VH4 of an antigen binding polypeptide complex described herein are joined by a cleavable linker. In some aspects, VH3 and VL4 of an antigen binding polypeptide complex described herein are joined by a cleavable linker. In some aspects, VL3 and VH4 of an antigen binding polypeptide complex described herein are joined by a cleavable linker. In some aspects, VL3 and VL4 of an antigen binding polypeptide complex described herein are joined by a cleavable linker. In some aspects, VH3 and VH4 of an antigen binding polypeptide complex described herein are joined by a GS linker. In some aspects, VH3 and VL4 of an antigen binding polypeptide complex described herein are joined by a GS linker. In some aspects, VL3 and VH4 of an antigen binding polypeptide complex described herein are joined by a GS linker. In some aspects, VL3 and VL4 of an antigen binding polypeptide complex described herein are joined by a GS linker.

[0115] In some aspects, VL4 and VL3 of an antigen binding polypeptide complex described herein are joined by a cleavable linker. In some aspects, VH4 and VL3 of an antigen binding polypeptide complex described herein are joined by a cleavable linker. In some aspects, VL4 and VH3 of an antigen binding polypeptide complex described herein are joined by a cleavable linker. In some aspects, VH4 and VH3 of an antigen binding polypeptide complex described herein are joined by a cleavable linker. In some aspects, VL4 and VL3 of an antigen binding polypeptide complex described herein are joined by a GS linker. In some aspects, VH4 and VL3 of an antigen binding polypeptide complex described herein are joined by a GS linker. In some aspects, VL4 and VH3 of an antigen binding polypeptide complex described herein are joined by a GS linker. In some aspects, VH4 and VH3 of an antigen binding polypeptide complex described herein are joined by a GS linker.

[0116] In some aspects, VH1 and VH2 of an antigen binding polypeptide complex described herein are joined by a cleavable linker, and VL2 and VL1 of an antigen binding polypeptide complex described herein are joined by a GS linker. In some aspects, VH1 and VL2 of an antigen binding polypeptide complex described herein are joined by a cleavable linker, and VH2 and VL1 of an antigen binding polypeptide complex described herein are joined by a GS linker. In some aspects, VL1 and VH2 of an antigen binding polypeptide complex described herein are joined by a cleavable linker, and VL2 and VH1 of an antigen binding polypeptide complex described herein are joined by a GS linker. In some aspects, VL1 and VL2 of an antigen binding polypeptide complex described herein are joined by a cleavable linker, and VH2 and VH1 of an antigen binding polypeptide complex described herein are joined by a GS linker. In some aspects, VH1 and VH2 of an antigen binding polypeptide complex described herein are joined by a GS linker, and VL2 and VL1 of an antigen binding polypeptide complex described herein are joined by a cleavable linker. In some aspects, VH1 and VL2 of an antigen binding polypeptide complex described herein are joined by a GS linker, and VH2 and VL1 of an antigen binding polypeptide complex described herein are joined by a cleavable linker. In some aspects, VL1 and VH2 of an antigen binding polypeptide complex described herein are joined by a GS linker, and VL2 and VH1 of an antigen binding polypeptide complex described herein are joined by a cleavable linker. In some aspects, VL1 and VL2 of an antigen binding polypeptide complex described herein are joined by a GS linker, and VH2 and VH1 of an antigen binding polypeptide complex described herein are joined by a cleavable linker.

[0117] In some aspects, VH3 and VH4 of an antigen binding polypeptide complex described herein are joined by a cleavable linker, and VL4 and VL3 of an antigen binding polypeptide complex described herein are joined by a GS linker. In some aspects, VH3 and VL4 of an antigen binding polypeptide complex described herein are joined by a cleavable linker, and VH4 and VL3 of an antigen binding polypeptide complex described herein are joined by a GS linker. In some aspects, VL3 and VH4 of an antigen binding polypeptide complex described herein are joined by a cleavable linker, and VL4 and VH3 of an antigen binding polypeptide complex described herein are joined by a GS linker. In some aspects, VL3 and VL4 of an antigen binding polypeptide complex described herein are joined by a cleavable linker, and VH4 and VH3 of an antigen binding polypeptide complex described herein are joined by a GS linker. In some aspects, VH3 and VH4 of an antigen binding polypeptide complex described herein are joined by a GS linker, and VL4 and VL3 of an antigen binding polypeptide complex described herein are joined by a cleavable linker. In some aspects, VH3 and VL4 of an antigen binding polypeptide complex described herein are joined by a GS linker, and VH4 and VL3 of an antigen binding polypeptide complex described herein are joined by a cleavable linker. In some aspects, VL3 and VH4 of an antigen binding polypeptide complex described herein are joined by a GS linker, and VL4 and VH3 of an antigen binding polypeptide complex described herein are joined by a cleavable linker. In some aspects, VL3 and VL4 of an antigen binding polypeptide complex described herein are joined by a GS linker, and VH4 and VH3 of an antigen binding polypeptide complex described herein are joined by a cleavable linker.

[0118] In some aspects, one or more of VH1, VH2, VH3 or VH4 of an antigen binding polypeptide complex described herein specifically binds to a tumor-associated antigen (TAA). In some aspects, one or more of VL1, VL2, VL3 or VL4 of an antigen binding polypeptide complex described herein specifically binds to a TAA. In some aspects, VH1 and VL1, VH2 and VL2, VH3 and VL3, and/or VH4 and VL4 or an antigen binding polypeptide complex described herein specifically binds to a TAA.

[0119] In some aspects, one or more of VH1, VH2, VH3 or VH4 of an antigen binding polypeptide complex described herein specifically binds to CD28. In some aspects, one or more of VL1, VL2, VL3 or VL4 of an antigen binding polypeptide complex described herein specifically binds to CD28. In some aspects, VH1 and VL1, VH2 and VL2, VH3 and VL3, and/or VH4 and VL4 or an antigen binding polypeptide complex described herein specifically binds to CD28.

[0120] In some aspects, the invention is directed to an antigen binding polypeptide complex comprising a first polypeptide, a second polypeptide, and a third polypeptide; wherein the first polypeptide has a structure represented by VL1-L1-VH1-L2-Fc; VH1-L3-VL1-L4-Fc; VH1-L1-VL1-L2-Fc; or VL1-L3-VH1-L4-Fc; wherein the second polypeptide has a structure represented by VH2-L5-VH3-L6-CH1-L7-Fc or VH3-L5-VH2-L6-CH1-L7-Fc; wherein the third polypeptide has a structure represented by VL2-L8-VL3-L9-CL or VL3-L8-VL2-L9-CL; wherein VL1 is a first immunoglobulin light chain variable region; VL2 is a second immunoglobulin light chain variable region; VL3 is a third immunoglobulin light chain variable region; VH1 is a first immunoglobulin heavy chain variable region; VH2 is a second immunoglobulin heavy chain variable region; VH3 is a third immunoglobulin heavy chain variable region; Fc is a region comprising an immunoglobulin heavy chain constant region 2 (CH2), an immunoglobulin heavy chain constant region 3 (CH3), and optionally, an immunoglobulin hinge; CH1 is an immunoglobulin heavy chain constant region 1; CL is an immunoglobulin light chain constant region; and L1-L9 are amino acid linkers. In some aspects, the first polypeptide has a structure represented by VL1-L1-VH1-L2-Fc; VH1-L3-VL1-L4-Fc; VH1-L1-VL1-L2-Fc; or VL1-L3-VH1-L4-Fc; the second polypeptide has a structure represented by VH2-L5-VH3-L6-CH1-L7-Fc; and the third polypeptide has a structure represented by VL2-L8-VL3-L9-CL. In some aspects, the first polypeptide has a structure represented by VL1-L1-VH1-L2-Fc; VH1-L3-VL1-L4-Fc; VH1-L1-VL1-L2-Fc; or VL1-L3-VH1-L4-Fc; the second polypeptide has a structure represented by VH2-L5-VH3-L6-CH1-L7-Fc; and the third polypeptide has a structure represented by VL3-L8-VL2-L9-CL. In some aspects, the first polypeptide has a structure represented by VL1-L1-VH1-L2-Fc; VH1-L3-VL1-L4-Fc; VH1-L1-VL1-L2-Fc; or VL1-L3-VH1-L4-Fc; the second polypeptide has a structure represented by VH3-L5-VH2-L6-CH1-L7-Fc, and the third polypeptide has a structure represented by VL2-L8-VL3-L9-CL. In some aspects, the first polypeptide has a structure represented by VL1-L1-VH1-L2-Fc; VH1-L3-VL1-L4-Fc; VH1-L1-VL1-L2-Fc; or VL1-L3-VH1-L4-Fc; the second polypeptide has a structure represented by VH3-L5-VH2-L6-CH1-L7-Fc; and the third polypeptide has a structure represented by VL3-L8-VL2-L9-CL. In some aspects, the invention is directed to an antigen binding polypeptide complex comprising a first polypeptide, a second polypeptide, and a third polypeptide; wherein the first polypeptide has a structure represented by VL1-L1-VH1-L2-Fc or VH1-L3-VL1-L4-Fc; wherein the second polypeptide has a structure represented by VH2-L5-VH3-L6-CH1-L7-Fc; wherein the third polypeptide has a structure represented by VL2-L8-VL3-L9-CL; wherein VL1 is a first immunoglobulin light chain variable region; VL2 is a second immunoglobulin light chain variable region; VL3 is a third immunoglobulin light chain variable region; VH1 is a first immunoglobulin heavy chain variable region; VH2 is a second immunoglobulin heavy chain variable region; VH3 is a third immunoglobulin heavy chain variable region; Fc is a region comprising an immunoglobulin heavy chain constant region 2 (CH2), an immunoglobulin heavy chain constant region 3 (CH3), and optionally, an immunoglobulin hinge; CH1 is an immunoglobulin heavy chain constant region 1; CL is an immunoglobulin light chain constant region; and L1-L9 are amino acid linkers.

[0121] 21| In some aspects, the invention is directed to an antigen binding polypeptide complex comprising a first polypeptide, a second polypeptide, a third polypeptide, and a fourth polypeptide; wherein the first polypeptide has a structure represented by VL1-L1-CL or VH1-L1-CL; wherein the second polypeptide has a structure represented by VH1-L2-CH1-L3-Fc or VL1-L2-CH1-L3-Fc; wherein the third polypeptide has a structure represented by VH2-L4-VH3-L5-CH1-L6-Fc or VH3-L4-VH2-L5-CH1-L6-Fc; wherein the fourth polypeptide has a structure represented by VL2-L7-VL3-L8-CL or VL3-L7-VL2-L8-CL; wherein VL1 is a first immunoglobulin light chain variable region; VL2 is a second immunoglobulin light chain variable region; VL3 is a third immunoglobulin light chain variable region; VH1 is a first immunoglobulin heavy chain variable region; VH2 is a second immunoglobulin heavy chain variable region; VH3 is a third immunoglobulin heavy chain variable region; Fc is a region comprising an immunoglobulin heavy chain constant region 2 (CH2), an immunoglobulin heavy chain constant region 3 (CH3), and optionally, an immunoglobulin hinge; CH1 is an immunoglobulin heavy chain constant region 1; CL is an immunoglobulin light chain constant region; and L1-L8 are amino acid linkers. In some aspects, the invention is directed to an antigen binding polypeptide complex comprising a first polypeptide, a second polypeptide, a third polypeptide, and a fourth polypeptide; wherein the first polypeptide has a structure represented by VL1-L1-CL; wherein the second polypeptide has a structure represented by VH1-L2-CH1-L3-Fc; wherein the third polypeptide has a structure represented by VH2-L4-VH3-L5-CH1-L6-Fc or VH3-L4-VH2-L5-CH1-L6-Fc; wherein the fourth polypeptide has a structure represented by VL2-L7-VL3-L8-CL or VL3-L7-VL2-L8-CL; wherein VL1 is a first immunoglobulin light chain variable region; VL2 is a second immunoglobulin light chain variable region; VL3 is a third immunoglobulin light chain variable region; VH1 is a first immunoglobulin heavy chain variable region; VH2 is a second immunoglobulin heavy chain variable region; VH3 is a third immunoglobulin heavy chain variable region; Fc is a region comprising an immunoglobulin heavy chain constant region 2 (CH2), an immunoglobulin heavy chain constant region 3 (CH3), and optionally, an immunoglobulin hinge; CH1 is an immunoglobulin heavy chain constant region 1; CL is an immunoglobulin light chain constant region; and L1-L8 are amino acid linkers. In some aspects, the invention is directed to an antigen binding polypeptide complex comprising a first polypeptide, a second polypeptide, a third polypeptide, and a fourth polypeptide; wherein the first polypeptide has a structure represented by VH1-L1-CL; wherein the second polypeptide has a structure represented by VL1-L2-CH1-L3-Fc; wherein the third polypeptide has a structure represented by VH2-L4-VH3-L5-CH1-L6-Fc or VH3-L4-VH2-L5-CH1-L6-Fc; wherein the fourth polypeptide has a structure represented by VL2-L7-VL3-L8-CL or VL3-L7-VL2-L8-CL; wherein VL1 is a first immunoglobulin light chain variable region; VL2 is a second immunoglobulin light chain variable region; VL3 is a third immunoglobulin light chain variable region; VH1 is a first immunoglobulin heavy chain variable region; VH2 is a second immunoglobulin heavy chain variable region; VH3 is a third immunoglobulin heavy chain variable region; Fc is a region comprising an immunoglobulin heavy chain constant region 2 (CH2), an immunoglobulin heavy chain constant region 3 (CH3), and optionally, an immunoglobulin hinge; CH1 is an immunoglobulin heavy chain constant region 1; CL is an immunoglobulin light chain constant region; and L1-L8 are amino acid linkers. In some aspects, the first polypeptide has a structure represented by VL1-L1-CL; the second polypeptide has a structure represented by VH1-L2-CH1-L3-Fc; the third polypeptide has a structure represented by VH2-L4-VH3-L5-CH1-L6-Fc; and the fourth polypeptide has a structure represented by VL2-L7-VL3-L8-CL. In some aspects, the first polypeptide has a structure represented by VL1-L1-CL; the second polypeptide has a structure represented by VH1-L2-CH1-L3-Fc; the third polypeptide has a structure represented by VH3-L4-VH2-L5-CH1-L6-Fc; and the fourth polypeptide has a structure represented by VL2-L7-VL3-L8-CL. In some aspects, the first polypeptide has a structure represented by VL1-L1-CL; the second polypeptide has a structure represented by VH1-L2-CH1-L3-Fc; the third polypeptide has a structure represented by VH2-L4-VH3-L5-CH1-L6-Fc; and the fourth polypeptide has a structure represented by VL3-L7-VL2-L8-CL. In some aspects, the first polypeptide has a structure represented by VL1-L1-CL; the second polypeptide has a structure represented by VH1-L2-CH1-L3-Fc; the third polypeptide has a structure represented by VH3-L4-VH2-L5-CH1-L6-Fc; and the fourth polypeptide has a structure represented by VL3-L7-VL2-L8-CL. In some aspects, the first polypeptide has a structure represented by VH1-L1-CL; the second polypeptide has a structure represented by VL1-L2-CH1-L3-Fc; the third polypeptide has a structure represented by VH2-L4-VH3-L5-CH1-L6-Fc; and the fourth polypeptide has a structure represented by VL2-L7-VL3-L8-CL. In some aspects, the first polypeptide has a structure represented by VH1-L1-CL; the second polypeptide has a structure represented by VL1-L2-CH1-L3-Fc; the third polypeptide has a structure represented by VH3-L4-VH2-L5-CH1-L6-Fc; and the fourth polypeptide has a structure represented by VL2-L7-VL3-L8-CL. In some aspects, the first polypeptide has a structure represented by VH1-L1-CL; the second polypeptide has a structure represented by VL1-L2-CH1-L3-Fc; the third polypeptide has a structure represented by VH2-L4-VH3-L5-CH1-L6-Fc; and the fourth polypeptide has a structure represented by VL3-L7-VL2-L8-CL. In some aspects, the first polypeptide has a structure represented by VH1-L1-CL; the second polypeptide has a structure represented by VL1-L2-CH1-L3-Fc; the third polypeptide has a structure represented by VH3-L4-VH4-L5-CH1-L6-Fc; and the fourth polypeptide has a structure represented by VL3-L7-VL2-L8-CL.

[0122] In some aspects, the invention is directed to an antigen binding polypeptide complex comprising a first polypeptide, a second polypeptide, and a third polypeptide; wherein the first polypeptide has a structure represented by VL1-L1-VL2-L2-VH2-L3-VH1-L4-Fc; VL1-L1-VH2-L2-VL2-L3-VH1-L4-Fc; VH1-L5-VH2-L6-VL2-L7-VL1-L8-Fc; or VH1-L5-VL2-L6-VH2-L7-VL1-L8-Fc; wherein the second polypeptide has a structure represented by VH3-L9-VH4-L10-CH1-L11-Fc or VH4-L9-VH3-L10-CH1-L11-Fc; wherein the third polypeptide has a structure represented by VL3-L12-VL4-L13-CL or VL4-L12-VL3-L13-CL; wherein VL1 is a first immunoglobulin light chain variable region; VL2 is a second immunoglobulin light chain variable region; VL3 is a third immunoglobulin light chain variable region; VL4 is a fourth immunoglobulin light chain variable region; VH1 is a first immunoglobulin heavy chain variable region; VH2 is a second immunoglobulin heavy chain variable region; VH3 is a third immunoglobulin heavy chain variable region; VH4 is a fourth immunoglobulin heavy chain variable region; Fc is a region comprising an immunoglobulin heavy chain constant region 2 (CH2), an immunoglobulin heavy chain constant region 3 (CH3), and optionally, an immunoglobulin hinge; CH1 is an immunoglobulin heavy chain constant region 1; CL is an immunoglobulin light chain constant region; and L1-L13 are amino acid linkers. In some aspects, the first polypeptide has a structure represented by VL1-L1-VL2-L2-VH2-L3-VH1-L4-Fc; VL1-L1-VH2-L2-VL2-L3-VH1-L4-Fc; VH1-L5-VH2-L6-VL2-L7-VL1-L8-Fc; or VH1-L5-VL2-L6-VH2-L7-VL1-L8-Fc; the second polypeptide has a structure represented by VH3-L9-VH4-L10-CH1-L11-Fc, and the third polypeptide has a structure represented by VL3-L12-VL4-L13-CL. In some aspects, the first polypeptide has a structure represented by VL1-L1-VL2-L2-VH2-L3-VH1-L4-Fc; VL1-L1-VH2-L2-VL2-L3-VH1-L4-Fc; VH1-L5-VH2-L6-VL2-L7-VL1-L8-Fc; or VH1-L5-VL2-L6-VH2-L7-VL1-L8-Fc; the second polypeptide has a structure represented by VH3-L9-VH4-L10-CH1-L11-Fc; and the third polypeptide has a structure represented by VL4-L12-VL3-L13-CL. In some aspects, the first polypeptide has a structure represented by VL1-L1-VL2-L2-VH2-L3-VH1-L4-Fc; VL1-L1-VH2-L2-VL2-L3-VH1-L4-Fc; VH1-L5-VH2-L6-VL2-L7-VL1-L8-Fc; or VH1-L5-VL2-L6-VH2-L7-VL1-L8-Fc; the second polypeptide has a structure represented by VH4-L9-VH3-L10-CH1-L1 I-Fc, and the third polypeptide has a structure represented by VL3-L12-VL4-L13-CL. In some aspects, the first polypeptide has a structure represented by VL1-L1-VL2-L2-VH2-L3-VH1-L4-Fc; VL1-L1-VH2-L2-VL2-L3-VH1-L4-Fc; VH1-L5-VH2-L6-VL2-L7-VL1-L8-Fc; or VH1-L5-VL2-L6-VH2-L7-VL1-L8-Fc; the second polypeptide has a structure represented by VH4-L9-VH3-L10-CH1-L11-Fc; and the third polypeptide has a structure represented by VL4-L12-VL3-L13-CL. In some aspects, the first polypeptide has a structure represented by: VL1-L1-VL2-L2-VH2-L3-VH1-L4-Fc; or VH1-L5-VH2-L6-VL2-L7-VL1-L8-Fc; the second polypeptide has a structure represented by: VH3-L9-VH4-L10-CH1-L11-Fc; and the third polypeptide has a structure represented by: VL3-L12-VL4-L13-CL. In some aspects, the first polypeptide has a structure represented by: VL1-L1-VL2-L2-VH2-L3-VH1-L4-Fc or VH1-L5-VL2-L6-VH2-L7-VL1-L8-Fc; the second polypeptide has a structure represented by: VH3-L9-VH4-L10-CH1-L11-Fc; and the third polypeptide has a structure represented by: VL3-L12-VL4-L13-CL. In some aspects, the first polypeptide has a structure represented by: VL1-L1-VL2-L2-VH2-L3-VH1-L4-Fc; the second polypeptide has a structure represented by: VH3-L9-VH4-L10-CH1-L11-Fc; and the third polypeptide has a structure represented by: VL3-L12-VL4-L13-CL. In some aspects, the first polypeptide has a structure represented by: VH1-L5-VL2-L6-VH2-L7-VL1-L8-Fc; the second polypeptide has a structure represented by: VH3-L9-VH4-L10-CH1-L11-Fc; and the third polypeptide has a structure represented by: VL3-L12-VL4-L13-CL.

[0123] In some aspects, the invention is directed to an antigen binding polypeptide complex comprising a first polypeptide, a second polypeptide, and a third polypeptide; wherein the first polypeptide has a structure represented by VL1-L1-VL2-L2-VH2-L3-VH1-L4-Fc; VL1-L1-VH2-L2-VL2-L3-VH1-L4-Fc; VH1-L5-VH2-L6-VL2-L7-VL1-L8-Fc; or VH1-L5-VL2-L6-VH2-L7-VL1-L8-Fc; wherein the second polypeptide has a structure represented by VH3-L9-VH4-CH1-Fc; or VH4-L9-VH3-CH1-Fc; wherein the third polypeptide has a structure represented by VL3-L10-VL4-CL or VL4-L10-VL3-CL; wherein VL1 is a first immunoglobulin light chain variable region; VL2 is a second immunoglobulin light chain variable region; VL3 is a third immunoglobulin light chain variable region; VL4 is a fourth immunoglobulin light chain variable region; VH1 is a first immunoglobulin heavy chain variable region; VH2 is a second immunoglobulin heavy chain variable region; VH3 is a third immunoglobulin heavy chain variable region; VH4 is a fourth immunoglobulin heavy chain variable region; Fc is a region comprising an immunoglobulin heavy chain constant region 2 (CH2), an immunoglobulin heavy chain constant region 3 (CH3), and optionally, an immunoglobulin hinge; CH1 is an immunoglobulin heavy chain constant region 1; CL is an immunoglobulin light chain constant region; and L1-L10 are amino acid linkers. In some aspects, the first polypeptide has a structure represented by VL1-L1-VL2-L2-VH2-L3-VH1-L4-Fc; VL1-L1-VH2-L2-VL2-L3-VH1-L4-Fc; VH1-L5-VH2-L6-VL2-L7-VL1-L8-Fc; or VH1-L5-VL2-L6-VH2-L7-VL1-L8-Fc; the second polypeptide has a structure represented by VH3-L9-VH4-CH1-Fc, and the third polypeptide has a structure represented by VL3-L10-VL4-CL. In some aspects, the first polypeptide has a structure represented by VL1-L1-VL2-L2-VH2-L3-VH1-L4-Fc; VL1-L1-VH2-L2-VL2-L3-VH1-L4-Fc; VH1-L5-VH2-L6-VL2-L7-VL1-L8-Fc; or VH1-L5-VL2-L6-VH2-L7-VL1-L8-Fc; the second polypeptide has a structure represented by VH3-L9-VH4-CH1-Fc; and the third polypeptide has a structure represented by VL4-L10-VL3-CL. In some aspects, the first polypeptide has a structure represented by VL1-L1-VL2-L2-VH2-L3-VH1-L4-Fc; VL1-L1-VH2-L2-VL2-L3-VH1-L4-Fc; VH1-L5-VH2-L6-VL2-L7-VL1-L8-Fc; or VH1-L5-VL2-L6-VH2-L7-VL1-L8-Fc; the second polypeptide has a structure represented by VH4-L9-VH3-CH1-Fc, and the third polypeptide has a structure represented by VL3-L10-VL4-CL. In some aspects, the first polypeptide has a structure represented by VL1-L1-VL2-L2-VH2-L3-VH1-L4-Fc; VL1-L1-VH2-L2-VL2-L3-VH1-L4-Fc; VH1-L5-VH2-L6-VL2-L7-VL1-L8-Fc; or VH1-L5-VL2-L6-VH2-L7-VL1-L8-Fc; the second polypeptide has a structure represented by VH4-L9-VH3-CH1-Fc; and the third polypeptide has a structure represented by VL4-L10-VL3-CL. In some aspects, the first polypeptide has a structure represented by: VL1-L1-VL2-L2-VH2-L3-VH1-L4-Fc; or VH1-L5-VH2-L6-VL2-L7-VL1-L8-Fc; the second polypeptide has a structure represented by: VH3-L9-VH4-CH1-Fc; and the third polypeptide has a structure represented by: VL3-L10-VL4-CL. In some aspects, the first polypeptide has a structure represented by: VL1-L1-VL2-L2-VH2-L3-VH1-L4-Fc or VH1-L5-VL2-L6-VH2-L7-VL1-L8-Fc; the second polypeptide has a structure represented by: VH3-L9-VH4-CH1-Fc; and the third polypeptide has a structure represented by: VL3-L10-VL4-CL. In some aspects, the first polypeptide has a structure represented by: VL1-L1-VL2-L2-VH2-L3-VH1-L4-Fc; the second polypeptide has a structure represented by: VH3-L9-VH4-CH1-Fc; and the third polypeptide has a structure represented by: VL3-L10-VL4-CL. In some aspects, the first polypeptide has a structure represented by: VH1-L5-VL2-L6-VH2-L7-VL1-L8-Fc; the second polypeptide has a structure represented by: VH3-L9-VH4-CH1-Fc; and the third polypeptide has a structure represented by: VL3-L10-VL4-CL.

[0124] In some aspects, the invention is directed to an antigen binding polypeptide complex comprising a first polypeptide and a second polypeptide; wherein the first polypeptide has a structure represented by VL1-L1-VL2-L2-VH2-L3-VH1-L4-Fc; VL1-L1-VH2-L2-VL2-L3-VH1-L4-Fc; VH1-L5-VH2-L6-VL2-L7-VL1-L8-Fc; or VH1-L5-VL2-L6-VH2-VL1-L8-Fc; wherein the second polypeptide has a structure represented by VL3-L9-VL4-L10-VH4-L11-VH3-L12-Fc; VL3-L9-VH4-L10-VL4-L11-VH3-L12-Fc; VH3-L13-VH4-L14-VL4-L15-VL3-L16-Fc; or VH3-L13-VL4-L14-VH4-L15-VL3-L16-Fc; wherein VL1 is a first immunoglobulin light chain variable region that specifically binds to a tumor-associated antigen; VL2 is a second immunoglobulin light chain variable region that specifically binds to a tumor-associated antigen; VL3 is a third immunoglobulin light chain variable region that specifically binds to CD3; VL4 is a fourth immunoglobulin light chain variable region that specifically binds to a tumor-associated antigen; VH1 is a first immunoglobulin heavy chain variable region that specifically binds to a tumor-associated antigen; VH2 is a second immunoglobulin heavy chain variable region that specifically binds to a tumor-associated antigen; VH3 is a third immunoglobulin heavy chain variable region that specifically binds to CD3; VH4 is a fourth immunoglobulin heavy chain variable region that specifically binds to a tumor-associated antigen; Fc is a region comprising an immunoglobulin heavy chain constant region 2 (CH2), an immunoglobulin heavy chain constant region 3 (CH3), and optionally, an immunoglobulin hinge; and L1-L16 are amino acid linkers. In some aspects, the first polypeptide has a structure represented by VL1-L1-VL2-L2-VH2-L3-VH1-L4-Fc; VL1-L1-VH2-L2-VL2-L3-VH1-L4-Fc; VH1-L5-VH2-L6-VL2-L7-VL1-L8-Fc; or VH1-L5-VL2-L6-VH2-VL1-L8-Fc; and the second polypeptide has a structure represented by VL3-L9-VL4-L10-VH4-L11-VH3-L12-Fc. In some aspects, the first polypeptide has a structure represented by VL1-L1-VL2-L2-VH2-L3-VH1-L4-Fc; VL1-L1-VH2-L2-VL2-L3-VH1-L4-Fc; VH1-L5-VH2-L6-VL2-L7-VL1-L8-Fc; or VH1-L5-VL2-L6-VH2-VL1-L8-Fc; and the second polypeptide has a structure represented by VL3-L9-VH4-L10-VL4-L11-VH3-L12-Fc. In some aspects, the first polypeptide has a structure represented by VL1-L1-VL2-L2-VH2-L3-VH1-L4-Fc; VL1-L1-VH2-L2-VL2-L3-VH1-L4-Fc; VH1-L5-VH2-L6-VL2-L7-VL1-L8-Fc; or VH1-L5-VL2-L6-VH2-VL1-L8-Fc; and the second polypeptide has a structure represented by VH3-L13-VH4-L14-VL4-L15-VL3-L16-Fc. In some aspects, the first polypeptide has a structure represented by VL1-L1-VL2-L2-VH2-L3-VH1-L4-Fc; VL1-L1-VH2-L2-VL2-L3-VH1-L4-Fc; VH1-L5-VH2-L6-VL2-L7-VL1-L8-Fc; or VH1-L5-VL2-L6-VH2-VL1-L8-Fc; and the second polypeptide has a structure represented by VH3-L13-VL4-L14-VH4-L15-VL3-L16-Fc. In some aspects, the first polypeptide has a structure represented by VL1-L1-VL2-L2-VH2-L3-VH1-L4-Fc or VH1-L5-VH2-L6-VL2-L7-VL1-L8-Fc; and the second polypeptide has a structure represented by VL3-L9-VL4-L10-VH4-L11-VH3-L12-Fc or VH3-L13-VH4-L14-VL4-L15-VL3-L16-Fc. In some aspects, the first polypeptide has a structure represented by VL1-L1-VL2-L2-VH2-L3-VH1-L4-Fc and the second polypeptide has a structure represented by VL3-L9-VL4-L10-VH4-L11-VH3-L12-Fc. In some aspects, the first polypeptide has a structure represented by VL1-L1-VL2-L2-VH2-L3-VH1-L4-Fc and the second polypeptide has a structure represented by VH3-L13-VH4-L14-VL4-L15-VL3-L16-Fc. In some aspects, the first polypeptide has a structure represented by VH1-L5-VH2-L6-VL2-L7-VL1-L8-Fc and the second polypeptide has a structure represented by VL3-L9-VL4-L10-VH4-L11-VH3-L12-Fc. In some aspects, the first polypeptide has a structure represented by VH1-L5-VH2-L6-VL2-L7-VL1-L8-Fc and the second polypeptide has a structure represented by VH3-L13-VH4-L14-VL4-L15-VL3-L16-Fc.

[0125] In some aspects, the first polypeptide has a structure represented by VL1-L1-VL2-L2-VH2-L3-VH1-L4-Fc and the second polypeptide has a structure represented by VL3-L5-VL4-L6-VH4-L7-VH3-L8-Fc; wherein VL1 is a first immunoglobulin light chain variable region that specifically binds to Trop2, cMet, CD3 or CD28; VL2 is a second immunoglobulin light chain variable region that specifically binds to Trop2, cMet, CD3 or CD28; VL3 is a third immunoglobulin light chain variable region that specifically binds to Trop2, cMet, CD3 or CD28; VL4 is a fourth immunoglobulin light chain variable region that specifically binds to Trop2, cMet, CD3 or CD28; VH1 is a first immunoglobulin heavy chain variable region that specifically binds to Trop2, cMet, CD3 or CD28; VH2 is a second immunoglobulin heavy chain variable region that specifically binds to Trop2, cMet, CD3 or CD28; VH3 is a third immunoglobulin heavy chain variable region that specifically binds to Trop2, cMet, CD3 or CD28; VH4 is a fourth immunoglobulin heavy chain variable region that specifically binds to Trop2, cMet, CD3 or CD28; Fc is a region comprising an immunoglobulin heavy chain constant region 2 (CH2), an immunoglobulin heavy chain constant region 3 (CH3), and optionally, an immunoglobulin hinge; and L1-L8 are amino acid linkers. For example, VL1 is a first immunoglobulin light chain variable region that specifically binds to Trop2; VL2 is a second immunoglobulin light chain variable region that specifically binds to cMet; VL3 is a third immunoglobulin light chain variable region that specifically binds to CD3; VL4 is a fourth immunoglobulin light chain variable region that specifically binds to CD28; VH1 is a first immunoglobulin heavy chain variable region that specifically binds to Trop2; VH2 is a second immunoglobulin heavy chain variable region that specifically binds to cMet; VH3 is a third immunoglobulin heavy chain variable region that specifically binds to CD3; and VH4 is a fourth immunoglobulin heavy chain variable region that specifically binds to CD28. For example, VL1 is a first immunoglobulin light chain variable region that specifically binds to Trop2; VL2 is a second immunoglobulin light chain variable region that specifically binds to cMet; VL3 is a third immunoglobulin light chain variable region that specifically binds to CD28; VL4 is a fourth immunoglobulin light chain variable region that specifically binds to CD3; VH1 is a first immunoglobulin heavy chain variable region that specifically binds to Trop2; VH2 is a second immunoglobulin heavy chain variable region that specifically binds to cMet; VH3 is a third immunoglobulin heavy chain variable region that specifically binds to CD28; and VH4 is a fourth immunoglobulin heavy chain variable region that specifically binds to CD3. For example, VL1 is a first immunoglobulin light chain variable region that specifically binds to cMet; VL2 is a second immunoglobulin light chain variable region that specifically binds to Trop2; VL3 is a third immunoglobulin light chain variable region that specifically binds to CD3; VL4 is a fourth immunoglobulin light chain variable region that specifically binds to CD28; VH1 is a first immunoglobulin heavy chain variable region that specifically binds to cMet; VH2 is a second immunoglobulin heavy chain variable region that specifically binds to Trop2; VH3 is a third immunoglobulin heavy chain variable region that specifically binds to CD3; and VH4 is a fourth immunoglobulin heavy chain variable region that specifically binds to CD28. For example, VL1 is a first immunoglobulin light chain variable region that specifically binds to cMet; VL2 is a second immunoglobulin light chain variable region that specifically binds to Trop2; VL3 is a third immunoglobulin light chain variable region that specifically binds to CD28; VL4 is a fourth immunoglobulin light chain variable region that specifically binds to CD3; VH1 is a first immunoglobulin heavy chain variable region that specifically binds to cMet; VH2 is a second immunoglobulin heavy chain variable region that specifically binds to Trop2; VH3 is a third immunoglobulin heavy chain variable region that specifically binds to CD28; and VH4 is a fourth immunoglobulin heavy chain variable region that specifically binds to CD3. In some aspects, the antigen binding polypeptide complex comprises amino acid sequences having at least 80%, at least 85%, at least 90%, at least 95%, or 100% identity to SEQ ID NOs:204 and 511. In some aspects, the antigen binding polypeptide complex comprises amino acid sequences encoded by polynucleotides having at least 80%, at least 85%, at least 90%, at least 95%, or 100% identity to SEQ ID NOs:205 and 512.

[0126] In some aspects, the first polypeptide has a structure represented by VL1-L1-VH2-L2-VL2-L3-VH1-L4-Fc and the second polypeptide has a structure represented by VL3-L5-VH4-L6-VL4-L7-VH3-L8-Fc; wherein VL1 is a first immunoglobulin light chain variable region that specifically binds to Trop2, cMet, CD3 or CD28; VL2 is a second immunoglobulin light chain variable region that specifically binds to Trop2, cMet, CD3 or CD28; VL3 is a third immunoglobulin light chain variable region that specifically binds to Trop2, cMet, CD3 or CD28; VL4 is a fourth immunoglobulin light chain variable region that specifically binds to Trop2, cMet, CD3 or CD28; VH1 is a first immunoglobulin heavy chain variable region that specifically binds to Trop2, cMet, CD3 or CD28; VH2 is a second immunoglobulin heavy chain variable region that specifically binds to Trop2, cMet, CD3 or CD28; VH3 is a third immunoglobulin heavy chain variable region that specifically binds to Trop2, cMet, CD3 or CD28; VH4 is a fourth immunoglobulin heavy chain variable region that specifically binds to Trop2, cMet, CD3 or CD28; Fc is a region comprising an immunoglobulin heavy chain constant region 2 (CH2), an immunoglobulin heavy chain constant region 3 (CH3), and optionally, an immunoglobulin hinge; and L1-L8 are amino acid linkers. For example, VL1 is a first immunoglobulin light chain variable region that specifically binds to cMet; VL2 is a second immunoglobulin light chain variable region that specifically binds to CD28; VL3 is a third immunoglobulin light chain variable region that specifically binds to Trop2; VL4 is a fourth immunoglobulin light chain variable region that specifically binds to CD3; VH1 is a first immunoglobulin heavy chain variable region that specifically binds to cMet; VH2 is a second immunoglobulin heavy chain variable region that specifically binds to CD28; VH3 is a third immunoglobulin heavy chain variable region that specifically binds to Trop2; and VH4 is a fourth immunoglobulin heavy chain variable region that specifically binds to CD3. In some aspects, the antigen binding polypeptide complex comprises amino acid sequences having at least 80%, at least 85%, at least 90%, at least 95%, or 100% identity to SEQ ID NOs:634 and 652. In some aspects, the antigen binding polypeptide complex comprises amino acid sequences encoded by polynucleotides having at least 80%, at least 85%, at least 90%, at least 95%, or 100% identity to SEQ ID NOs:635 and 653.

[0127] In some aspects, the first polypeptide has a structure represented by VH1-L1-VL2-L2-VH2-L3-VL1-L4-Fc and the second polypeptide has a structure represented by VH3-L5-VL4-L6-VH4-L7-VL3-L8-Fc; wherein VL1 is a first immunoglobulin light chain variable region that specifically binds to Trop2, cMet, CD3 or CD28; VL2 is a second immunoglobulin light chain variable region that specifically binds to Trop2, cMet, CD3 or CD28; VL3 is a third immunoglobulin light chain variable region that specifically binds to Trop2, cMet, CD3 or CD28; VL4 is a fourth immunoglobulin light chain variable region that specifically binds to Trop2, cMet, CD3 or CD28; VH1 is a first immunoglobulin heavy chain variable region that specifically binds to Trop2, cMet, CD3 or CD28; VH2 is a second immunoglobulin heavy chain variable region that specifically binds to Trop2, cMet, CD3 or CD28; VH3 is a third immunoglobulin heavy chain variable region that specifically binds to Trop2, cMet, CD3 or CD28; VH4 is a fourth immunoglobulin heavy chain variable region that specifically binds to Trop2, cMet, CD3 or CD28; Fc is a region comprising an immunoglobulin heavy chain constant region 2 (CH2), an immunoglobulin heavy chain constant region 3 (CH3), and optionally, an immunoglobulin hinge; and L1-L8 are amino acid linkers. For example, VL1 is a first immunoglobulin light chain variable region that specifically binds to cMet; VL2 is a second immunoglobulin light chain variable region that specifically binds to CD28; VL3 is a third immunoglobulin light chain variable region that specifically binds to Trop2; VL4 is a fourth immunoglobulin light chain variable region that specifically binds to CD3; VH1 is a first immunoglobulin heavy chain variable region that specifically binds to cMet; VH2 is a second immunoglobulin heavy chain variable region that specifically binds to CD28; VH3 is a third immunoglobulin heavy chain variable region that specifically binds to Trop2; and VH4 is a fourth immunoglobulin heavy chain variable region that specifically binds to CD3. In some aspects, the antigen binding polypeptide complex comprises amino acid sequences having at least 80%, at least 85%, at least 90%, at least 95%, or 100% identity to SEQ ID NOs:670 and 688. In some aspects, the antigen binding polypeptide complex comprises amino acid sequences encoded by polynucleotides having at least 80%, at least 85%, at least 90%, at least 95%, or 100% identity to SEQ ID NOs:671 and 689.

[0128] In some aspects, the first polypeptide has a structure represented by VH1-L1-VH2-L2-VL2-L3-VL1-L4-Fc and the second polypeptide has a structure represented by VH3-L5-VH4-L6-VL4-L7-VL3-L8-Fc; wherein VL1 is a first immunoglobulin light chain variable region that specifically binds to Trop2, cMet, CD3 or CD28; VL2 is a second immunoglobulin light chain variable region that specifically binds to Trop2, cMet, CD3 or CD28; VL3 is a third immunoglobulin light chain variable region that specifically binds to Trop2, cMet, CD3 or CD28; VL4 is a fourth immunoglobulin light chain variable region that specifically binds to Trop2, cMet, CD3 or CD28; VH1 is a first immunoglobulin heavy chain variable region that specifically binds to Trop2, cMet, CD3 or CD28; VH2 is a second immunoglobulin heavy chain variable region that specifically binds to Trop2, cMet, CD3 or CD28; VH3 is a third immunoglobulin heavy chain variable region that specifically binds to Trop2, cMet, CD3 or CD28; VH4 is a fourth immunoglobulin heavy chain variable region that specifically binds to Trop2, cMet, CD3 or CD28; Fc is a region comprising an immunoglobulin heavy chain constant region 2 (CH2), an immunoglobulin heavy chain constant region 3 (CH3), and optionally, an immunoglobulin hinge; and L1-L8 are amino acid linkers. For example, VL1 is a first immunoglobulin light chain variable region that specifically binds to cMet; VL2 is a second immunoglobulin light chain variable region that specifically binds to CD28; VL3 is a third immunoglobulin light chain variable region that specifically binds to Trop2; VL4 is a fourth immunoglobulin light chain variable region that specifically binds to CD3; VH1 is a first immunoglobulin heavy chain variable region that specifically binds to cMet; VH2 is a second immunoglobulin heavy chain variable region that specifically binds to CD28; VH3 is a third immunoglobulin heavy chain variable region that specifically binds to Trop2; and VH4 is a fourth immunoglobulin heavy chain variable region that specifically binds to CD3. In some aspects, the antigen binding polypeptide complex comprises amino acid sequences having at least 80%, at least 85%, at least 90%, at least 95%, or 100% identity to SEQ ID NOs:706 and 724. In some aspects, the antigen binding polypeptide complex comprises amino acid sequences encoded by polynucleotides having at least 80%, at least 85%, at least 90%, at least 95%, or 100% identity to SEQ ID NOs:707 and 725.

[0129] In some aspects, the first polypeptide has a structure represented by VL1-L1-VL2-L2-VH2-L3-VH1-L4-Fc and the second polypeptide has a structure represented by VL3-L5-VL4-L6-VH4-L7-VH3-L8-Fc; wherein VL1 is a first immunoglobulin light chain variable region that specifically binds to CD19, CD20, CD3 or CD28; VL2 is a second immunoglobulin light chain variable region that specifically binds to CD19, CD20, CD3 or CD28; VL3 is a third immunoglobulin light chain variable region that specifically binds to CD19, CD20, CD3 or CD28; VL4 is a fourth immunoglobulin light chain variable region that specifically binds to CD19, CD20, CD3 or CD28; VH1 is a first immunoglobulin heavy chain variable region that specifically binds to CD19, CD20, CD3 or CD28; VH2 is a second immunoglobulin heavy chain variable region that specifically binds to CD19, CD20, CD3 or CD28; VH3 is a third immunoglobulin heavy chain variable region that specifically binds to CD19, CD20, CD3 or CD28; VH4 is a fourth immunoglobulin heavy chain variable region that specifically binds to CD19, CD20, CD3 or CD28; Fc is a region comprising an immunoglobulin heavy chain constant region 2 (CH2), an immunoglobulin heavy chain constant region 3 (CH3), and optionally, an immunoglobulin hinge; and L1-L8 are amino acid linkers. For example, VL1 is a first immunoglobulin light chain variable region that specifically binds to CD19; VL2 is a second immunoglobulin light chain variable region that specifically binds to CD20; VL3 is a third immunoglobulin light chain variable region that specifically binds to CD3; VL4 is a fourth immunoglobulin light chain variable region that specifically binds to CD28; VH1 is a first immunoglobulin heavy chain variable region that specifically binds to CD19; VH2 is a second immunoglobulin heavy chain variable region that specifically binds to CD20; VH3 is a third immunoglobulin heavy chain variable region that specifically binds to CD3; and VH4 is a fourth immunoglobulin heavy chain variable region that specifically binds to CD28. For example, VL1 is a first immunoglobulin light chain variable region that specifically binds to CD20; VL2 is a second immunoglobulin light chain variable region that specifically binds to CD19; VL3 is a third immunoglobulin light chain variable region that specifically binds to CD3; VL4 is a fourth immunoglobulin light chain variable region that specifically binds to CD28; VH1 is a first immunoglobulin heavy chain variable region that specifically binds to CD20; VH2 is a second immunoglobulin heavy chain variable region that specifically binds to CD19; VH3 is a third immunoglobulin heavy chain variable region that specifically binds to CD3; and VH4 is a fourth immunoglobulin heavy chain variable region that specifically binds to CD28. For example, VL1 is a first immunoglobulin light chain variable region that specifically binds to CD19; VL2 is a second immunoglobulin light chain variable region that specifically binds to CD20; VL3 is a third immunoglobulin light chain variable region that specifically binds to CD28; VL4 is a fourth immunoglobulin light chain variable region that specifically binds to CD3; VH1 is a first immunoglobulin heavy chain variable region that specifically binds to CD19; VH2 is a second immunoglobulin heavy chain variable region that specifically binds to CD20; VH3 is a third immunoglobulin heavy chain variable region that specifically binds to CD28; and VH4 is a fourth immunoglobulin heavy chain variable region that specifically binds to CD3. For example, VL1 is a first immunoglobulin light chain variable region that specifically binds to CD20; VL2 is a second immunoglobulin light chain variable region that specifically binds to a CD19; VL3 is a third immunoglobulin light chain variable region that specifically binds to CD28; VL4 is a fourth immunoglobulin light chain variable region that specifically binds to CD3; VH1 is a first immunoglobulin heavy chain variable region that specifically binds to CD20; VH2 is a second immunoglobulin heavy chain variable region that specifically binds to CD19; VH3 is a third immunoglobulin heavy chain variable region that specifically binds to CD28; and VH4 is a fourth immunoglobulin heavy chain variable region that specifically binds to CD3.

[0130] In some aspects, the first polypeptide has a structure represented by VL1-L1-VL2-L2-VH2-L3-VH1-L4-Fc and the second polypeptide has a structure represented by VL3-L5-VL4-L6-VH4-L7-VH3-L8-Fc; wherein VL1 is a first immunoglobulin light chain variable region that specifically binds to CD20, CD3 or CD28; VL2 is a second immunoglobulin light chain variable region that specifically binds to CD20, CD3 or CD28; VL3 is a third immunoglobulin light chain variable region that specifically binds to CD20, CD3 or CD28; VL4 is a fourth immunoglobulin light chain variable region that specifically binds to CD20, CD3 or CD28; VH1 is a first immunoglobulin heavy chain variable region that specifically binds to CD20, CD3 or CD28; VH2 is a second immunoglobulin heavy chain variable region that specifically binds to CD20, CD3 or CD28; VH3 is a third immunoglobulin heavy chain variable region that specifically binds to CD20, CD3 or CD28; VH4 is a fourth immunoglobulin heavy chain variable region that specifically binds to CD20, CD3 or CD28; Fc is a region comprising an immunoglobulin heavy chain constant region 2 (CH2), an immunoglobulin heavy chain constant region 3 (CH3), and optionally, an immunoglobulin hinge; and L1-L8 are amino acid linkers. For example, VL1 is a first immunoglobulin light chain variable region that specifically binds to CD20; VL2 is a second immunoglobulin light chain variable region that specifically binds to CD20; VL3 is a third immunoglobulin light chain variable region that specifically binds to CD3; VL4 is a fourth immunoglobulin light chain variable region that specifically binds to CD20; VH1 is a first immunoglobulin heavy chain variable region that specifically binds to CD20; VH2 is a second immunoglobulin heavy chain variable region that specifically binds to CD20; VH3 is a third immunoglobulin heavy chain variable region that specifically binds to CD3; and VH4 is a fourth immunoglobulin heavy chain variable region that specifically binds to CD20. For example, VL1 is a first immunoglobulin light chain variable region that specifically binds to CD20; VL2 is a second immunoglobulin light chain variable region that specifically binds to CD20; VL3 is a third immunoglobulin light chain variable region that specifically binds to CD3; VL4 is a fourth immunoglobulin light chain variable region that specifically binds to CD28; VH1 is a first immunoglobulin heavy chain variable region that specifically binds to CD20; VH2 is a second immunoglobulin heavy chain variable region that specifically binds to CD20; VH3 is a third immunoglobulin heavy chain variable region that specifically binds to CD3; and VH4 is a fourth immunoglobulin heavy chain variable region that specifically binds to CD28. For example, VL1 is a first immunoglobulin light chain variable region that specifically binds to CD20; VL2 is a second immunoglobulin light chain variable region that specifically binds to CD20; VL3 is a third immunoglobulin light chain variable region that specifically binds to CD3; VL4 is a fourth immunoglobulin light chain variable region that specifically binds to CD28; VH1 is a first immunoglobulin heavy chain variable region that specifically binds to CD20; VH2 is a second immunoglobulin heavy chain variable region that specifically binds to CD20; VH3 is a third immunoglobulin heavy chain variable region that specifically binds to CD3; and VH4 is a fourth immunoglobulin heavy chain variable region that specifically binds to CD28.

[0131] In some aspects, the first polypeptide has a structure represented by VL1-L1-VL2-L2-VH2-L3-VH1-L4-Fc and the second polypeptide has a structure represented by VL3-L5-VL4-L6-VH4-L7-VH3-L8-Fc; wherein VL1 wherein VL1 is a first immunoglobulin light chain variable region that specifically binds to CD20, BCMA, CD3 or CD28; VL2 is a second immunoglobulin light chain variable region that specifically binds to CD20, BCMA, CD3 or CD28; VL3 is a third immunoglobulin light chain variable region that specifically binds to CD20, BCMA, CD3 or CD28; VL4 is a fourth immunoglobulin light chain variable region that specifically binds to CD20, BCMA, CD3 or CD28; VH1 is a first immunoglobulin heavy chain variable region that specifically binds to CD20, BCMA, CD3 or CD28; VH2 is a second immunoglobulin heavy chain variable region that specifically binds to CD20, BCMA, CD3 or CD28; VH3 is a third immunoglobulin heavy chain variable region that specifically binds to CD20, BCMA, CD3 or CD28; VH4 is a fourth immunoglobulin heavy chain variable region that specifically binds to CD20, BCMA, CD3 or CD28; Fc is a region comprising an immunoglobulin heavy chain constant region 2 (CH2), an immunoglobulin heavy chain constant region 3 (CH3), and optionally, an immunoglobulin hinge; and L1-L8 are amino acid linkers. For example, VL1 is a first immunoglobulin light chain variable region that specifically binds to CD20; VL2 is a second immunoglobulin light chain variable region that specifically binds to BCMA; VL3 is a third immunoglobulin light chain variable region that specifically binds to CD3; VL4 is a fourth immunoglobulin light chain variable region that specifically binds to CD28; VH1 is a first immunoglobulin heavy chain variable region that specifically binds to CD20; VH2 is a second immunoglobulin heavy chain variable region that specifically binds to BCMA; VH3 is a third immunoglobulin heavy chain variable region that specifically binds to CD3; and VH4 is a fourth immunoglobulin heavy chain variable region that specifically binds to CD28. For example, VL1 is a first immunoglobulin light chain variable region that specifically binds to CD20; VL2 is a second immunoglobulin light chain variable region that specifically binds to BCMA; VL3 is a third immunoglobulin light chain variable region that specifically binds to CD28; VL4 is a fourth immunoglobulin light chain variable region that specifically binds to CD3; VH1 is a first immunoglobulin heavy chain variable region that specifically binds to CD20; VH2 is a second immunoglobulin heavy chain variable region that specifically binds to BCMA; VH3 is a third immunoglobulin heavy chain variable region that specifically binds to CD28; and VH4 is a fourth immunoglobulin heavy chain variable region that specifically binds to CD3. For example, VL1 is a first immunoglobulin light chain variable region that specifically binds to BCMA; VL2 is a second immunoglobulin light chain variable region that specifically binds to CD20; VL3 is a third immunoglobulin light chain variable region that specifically binds to CD3; VL4 is a fourth immunoglobulin light chain variable region that specifically binds to CD28; VH1 is a first immunoglobulin heavy chain variable region that specifically binds to BCMA; VH2 is a second immunoglobulin heavy chain variable region that specifically binds to CD20; VH3 is a third immunoglobulin heavy chain variable region that specifically binds to CD3; and VH4 is a fourth immunoglobulin heavy chain variable region that specifically binds to CD28. For example, VL1 is a first immunoglobulin light chain variable region that specifically binds to BCMA; VL2 is a second immunoglobulin light chain variable region that specifically binds to CD20; VL3 is a third immunoglobulin light chain variable region that specifically binds to CD28; VL4 is a fourth immunoglobulin light chain variable region that specifically binds to CD3; VH1 is a first immunoglobulin heavy chain variable region that specifically binds to BCMA; VH2 is a second immunoglobulin heavy chain variable region that specifically binds to CD20; VH3 is a third immunoglobulin heavy chain variable region that specifically binds to CD28; and VH4 is a fourth immunoglobulin heavy chain variable region that specifically binds to CD3. For example, VL1 is a first immunoglobulin light chain variable region that specifically binds to CD20; VL2 is a second immunoglobulin light chain variable region that specifically binds to CD20; VL3 is a third immunoglobulin light chain variable region that specifically binds to CD28; VL4 is a fourth immunoglobulin light chain variable region that specifically binds to CD3; VH1 is a first immunoglobulin heavy chain variable region that specifically binds to CD20; VH2 is a second immunoglobulin heavy chain variable region that specifically binds to CD20; VH3 is a third immunoglobulin heavy chain variable region that specifically binds to CD28; and VH4 is a fourth immunoglobulin heavy chain variable region that specifically binds to CD3.

[0132] In some aspects, the first polypeptide has a structure represented by VL1-L1-VH2-L2-VL2-L3-VH1-L4-Fc and the second polypeptide has a structure represented by VL3-L5-VH4-L6-VL4-L7-VH3-L8-Fc; wherein VL1 is a first immunoglobulin light chain variable region that specifically binds to CD20, CD19, CD3 or CD28; VL2 is a second immunoglobulin light chain variable region that specifically binds to CD20, CD19, CD3 or CD28; VL3 is a third immunoglobulin light chain variable region that specifically binds to CD20, CD19, CD3 or CD28; VL4 is a fourth immunoglobulin light chain variable region that specifically binds to CD20, CD19, CD3 or CD28; VH1 is a first immunoglobulin heavy chain variable region that specifically binds to CD20, CD19, CD3 or CD28; VH2 is a second immunoglobulin heavy chain variable region that specifically binds to CD20, CD19, CD3 or CD28; VH3 is a third immunoglobulin heavy chain variable region that specifically binds to CD20, CD19, CD3 or CD28; VH4 is a fourth immunoglobulin heavy chain variable region that specifically binds to CD20, CD19, CD3 or CD28; Fc is a region comprising an immunoglobulin heavy chain constant region 2 (CH2), an immunoglobulin heavy chain constant region 3 (CH3), and optionally, an immunoglobulin hinge; and L1-L8 are amino acid linkers. For example, VL1 is a first immunoglobulin light chain variable region that specifically binds to CD19; VL2 is a second immunoglobulin light chain variable region that specifically binds to CD20; VL3 is a third immunoglobulin light chain variable region that specifically binds to CD3; VL4 is a fourth immunoglobulin light chain variable region that specifically binds to CD28; VH1 is a first immunoglobulin heavy chain variable region that specifically binds to CD19; VH2 is a second immunoglobulin heavy chain variable region that specifically binds to CD20; VH3 is a third immunoglobulin heavy chain variable region that specifically binds to CD3; and VH4 is a fourth immunoglobulin heavy chain variable region that specifically binds to CD28. In some aspects, the antigen binding polypeptide complex comprises amino acid sequences having at least 80%, at least 85%, at least 90%, at least 95%, or 100% identity to SEQ ID NOs:742 and 760. In some aspects, the antigen binding polypeptide complex comprises amino acid sequences encoded by polynucleotides having at least 80%, at least 85%, at least 90%, at least 95%, or 100% identity to SEQ ID NOs:743 and 761.

[0133] In some aspects, the first polypeptide has a structure represented by VH1-L1-VL2-L2-VH2-L3-VL1-L4-Fc and the second polypeptide has a structure represented by VH3-L5-VL4-L6-VH4-L7-VL3-L8-Fc; wherein VL1 is a first immunoglobulin light chain variable region that specifically binds to CD20, CD19, CD3 or CD28; VL2 is a second immunoglobulin light chain variable region that specifically binds to CD20, CD19, CD3 or CD28; VL3 is a third immunoglobulin light chain variable region that specifically binds to CD20, CD19, CD3 or CD28; VL4 is a fourth immunoglobulin light chain variable region that specifically binds to CD20, CD19, CD3 or CD28; VH1 is a first immunoglobulin heavy chain variable region that specifically binds to CD20, CD19, CD3 or CD28; VH2 is a second immunoglobulin heavy chain variable region that specifically binds to CD20, CD19, CD3 or CD28; VH3 is a third immunoglobulin heavy chain variable region that specifically binds to CD20, CD19, CD3 or CD28; VH4 is a fourth immunoglobulin heavy chain variable region that specifically binds to CD20, CD19, CD3 or CD28; Fe is a region comprising an immunoglobulin heavy chain constant region 2 (CH2), an immunoglobulin heavy chain constant region 3 (CH3), and optionally, an immunoglobulin hinge; and L1-L8 are amino acid linkers. For example, VL1 is a first immunoglobulin light chain variable region that specifically binds to CD19; VL2 is a second immunoglobulin light chain variable region that specifically binds to CD20; VL3 is a third immunoglobulin light chain variable region that specifically binds to CD3; VL4 is a fourth immunoglobulin light chain variable region that specifically binds to CD28; VH1 is a first immunoglobulin heavy chain variable region that specifically binds to CD19; VH2 is a second immunoglobulin heavy chain variable region that specifically binds to CD20; VH3 is a third immunoglobulin heavy chain variable region that specifically binds to CD3; and VH4 is a fourth immunoglobulin heavy chain variable region that specifically binds to CD28. In some aspects, the antigen binding polypeptide complex comprises amino acid sequences having at least 80%, at least 85%, at least 90%, at least 95%, or 100% identity to SEQ ID NOs:778 and 796. In some aspects, the antigen binding polypeptide complex comprises amino acid sequences encoded by polynucleotides having at least 80%, at least 85%, at least 90%, at least 95%, or 100% identity to SEQ ID NOs:779 and 797.

[0134] In some aspects, the antigen binding polypeptide complex comprises amino acid sequences having at least 80%, at least 85%, at least 90%, at least 95%, or 100% identity to SEQ ID NOs:206 and 513. In some aspects, the antigen binding polypeptide complex comprises amino acid sequences encoded by polynucleotides having at least 80%, at least 85%, at least 90%, at least 95%, or 100% identity to SEQ ID NOs:207 and 514. In some aspects, the antigen binding polypeptide complex comprises amino acid sequences having at least 80%, at least 85%, at least 90%, at least 95%, or 100% identity to SEQ ID NOs:204 and 511. In some aspects, the antigen binding polypeptide complex comprises amino acid sequences encoded by polynucleotides having at least 80%, at least 85%, at least 90%, at least 95%, or 100% identity to SEQ ID NOs:205 and 512. In some aspects, the antigen binding polypeptide complex comprises amino acid sequences having at least 80%, at least 85%, at least 90%, at least 95%, or 100% identity to SEQ ID NOs:274 and 513. In some aspects, the antigen binding polypeptide complex comprises amino acid sequences encoded by polynucleotides having at least 80%, at least 85%, at least 90%, at least 95%, or 100% identity to SEQ ID NOs:275 and 514. In some aspects, the antigen binding polypeptide complex comprises amino acid sequences having at least 80%, at least 85%, at least 90%, at least 95%, or 100% identity to SEQ ID NOs:228 and 511. In some aspects, the antigen binding polypeptide complex comprises amino acid sequences encoded by polynucleotides having at least 80%, at least 85%, at least 90%, at least 95%, or 100% identity to SEQ ID NOs:229 and 512. In some aspects, the antigen binding polypeptide complex comprises amino acid sequences having at least 80%, at least 85%, at least 90%, at least 95%, or 100% identity to SEQ ID NOs:206, 160 and 162. In some aspects, the antigen binding polypeptide complex comprises amino acid sequences encoded by polynucleotides having at least 80%, at least 85%, at least 90%, at least 95%, or 100% identity to SEQ ID NOs:207, 161 and 163. In some aspects, the antigen binding polypeptide complex comprises amino acid sequences having at least 80%, at least 85%, at least 90%, at least 95%, or 100% identity to SEQ ID NOs:206, 160 and 174. In some aspects, the antigen binding polypeptide complex comprises amino acid sequences encoded by polynucleotides having at least 80%, at least 85%, at least 90%, at least 95%, or 100% identity to SEQ ID NOs:207, 161 and 175. In some aspects, the antigen binding polypeptide complex comprises amino acid sequences having at least 80%, at least 85%, at least 90%, at least 95%, or 100% identity to SEQ ID NOs:206, 162 and 176. In some aspects, the antigen binding polypeptide complex comprises amino acid sequences encoded by polynucleotides having at least 80%, at least 85%, at least 90%, at least 95%, or 100% identity to SEQ ID NOs:207, 163 and 177. In some aspects, the antigen binding polypeptide complex comprises amino acid sequences having at least 80%, at least 85%, at least 90%, at least 95%, or 100% identity to SEQ ID NOs:204, 160 and 162. In some aspects, the antigen binding polypeptide complex comprises amino acid sequences encoded by polynucleotides having at least 80%, at least 85%, at least 90%, at least 95%, or 100% identity to SEQ ID NOs:205, 161 and 163. In some aspects, the antigen binding polypeptide complex comprises amino acid sequences having at least 80%, at least 85%, at least 90%, at least 95%, or 100% identity to SEQ ID NOs:204, 160 and 174. In some aspects, the antigen binding polypeptide complex comprises amino acid sequences encoded by polynucleotides having at least 80%, at least 85%, at least 90%, at least 95%, or 100% identity to SEQ ID NOs:205, 161 and 175. In some aspects, the antigen binding polypeptide complex comprises amino acid sequences having at least 80%, at least 85%, at least 90%, at least 95%, or 100% identity to SEQ ID NOs:204, 162 and 176. In some aspects, the antigen binding polypeptide complex comprises amino acid sequences encoded by polynucleotides having at least 80%, at least 85%, at least 90%, at least 95%, or 100% identity to SEQ ID NOs:205, 163 and 177.

[0135] In some aspects, the invention is directed to an antigen binding polypeptide complex comprising a first polypeptide and a second polypeptide; wherein the first polypeptide has a structure represented by VL1-L1-VL2-L2-VH2-L3-VH1-L4-Fc; VL1-L1-VH2-L2-VL2-L3-VH1-L4-Fc; VH1-L5-VH2-L6-VL2-L7-VL1-L8-Fc; or VH1-L5-VL2-L6-VH2-L7-VL1-L8-Fc; wherein the second polypeptide has a structure represented by VL3-L9-VL4-L10-VH4-L11-VH3-L12-Fc; VL3-L9-VH4-L10-VL4-L11-VH3-L12-Fc; VH3-L13-VH4-L14-VL4-L15-VL3-L16-Fc; or VH3-L13-VL4-L14-VH4-L15-VL3-L16-Fc; wherein VL1 is a first immunoglobulin light chain variable region that specifically binds to a tumor-associated antigen; VL2 is a second immunoglobulin light chain variable region that specifically binds to a tumor-associated antigen; VL3 is a third immunoglobulin light chain variable region that specifically binds to a tumor-associated antigen; VL4 is a fourth immunoglobulin light chain variable region that specifically binds to CD3; VH1 is a first immunoglobulin heavy chain variable region that specifically binds to a tumor-associated antigen; VH2 is a second immunoglobulin heavy chain variable region that specifically binds to a tumor-associated antigen; VH3 is a third immunoglobulin heavy chain variable region that specifically binds to a tumor-associated antigen; VH4 is a fourth immunoglobulin heavy chain variable region that specifically binds to CD3; Fe is a region comprising an immunoglobulin heavy chain constant region 2 (CH2), an immunoglobulin heavy chain constant region 3 (CH3), and optionally, an immunoglobulin hinge; and L1-L16 are amino acid linkers. In some aspects, the first polypeptide has a structure represented by VL1-L1-VL2-L2-VH2-L3-VH1-L4-Fc; VL1-L1-VH2-L2-VL2-L3-VH1-L4-Fc; VH1-L5-VH2-L6-VL2-L7-VL1-L8-Fc; or VH1-L5-VL2-L6-VH2-L7-VL1-L8-Fc and the second polypeptide has a structure represented by VL3-L9-VL4-L10-VH4-L11-VH3-L12-Fc. In some aspects, the first polypeptide has a structure represented by VL1-L1-VL2-L2-VH2-L3-VH1-L4-Fc; or VL1-L1-VH2-L2-VL2-L3-VH1-L4-Fc or VH1-L5-VH2-L6-VL2-L7-VL1-L8-Fc or VH1-L5-VL2-L6-VH2-L7-VL1-L8-Fe and the second polypeptide has a structure represented by VL3-L9-VH4-L10-VL4-L11-VH3-L12-Fc. In some aspects, the first polypeptide has a structure represented by VL1-L1-VL2-L2-VH2-L3-VH1-L4-Fc; or VL1-L1-VH2-L2-VL2-L3-VH1-L4-Fc or VH1-L5-VH2-L6-VL2-L7-VL1-L8-Fc or VH1-L5-VL2-L6-VH2-L7-VL1-L8-Fc and the second polypeptide has a structure represented by VH3-L13-VH4-L14-VL4-L15-VL3-L16-Fc. In some aspects, the first polypeptide has a structure represented by VL1-L1-VL2-L2-VH2-L3-VH1-L4-Fc; or VL1-L1-VH2-L2-VL2-L3-VH1-L4-Fc or VH1-L5-VH2-L6-VL2-L7-VL1-L8-Fc or VH1-L5-VL2-L6-VH2-L7-VL1-L8-Fe and the second polypeptide has a structure represented by VH3-L13-VL4-L14-VH4-L15-VL3-L16-Fc. In some aspects, the first polypeptide has a structure represented by VL1-L1-VL2-L2-VH2-L3-VH1-L4-Fc or VH1-L5-VH2-L6-VL2-L7-VL1-L8-Fc; and the second polypeptide has a structure represented by VL3-L9-VL4-L10-VH4-L11-VH3-L12-Fc or VH3-L13-VH4-L14-VL4-L15-VL3-L16-Fc. In some aspects, the first polypeptide has a structure represented by VL1-L1-VL2-L2-VH2-L3-VH1-L4-Fc and the second polypeptide has a structure represented by VL3-L9-VL4-L10-VH4-L11-VH3-L12-Fc. In some aspects, the first polypeptide has a structure represented by VL1-L1-VL2-L2-VH2-L3-VH1-L4-Fc and the second polypeptide has a structure represented by VH3-L13-VH4-L14-VL4-L15-VL3-L16-Fc. In some aspects, the first polypeptide has a structure represented by VH1-L5-VH2-L6-VL2-L7-VL1-L8-Fc and the second polypeptide has a structure represented by VL3-L9-VL4-L10-VH4-L11-VH3-L12-Fc. In some aspects, the first polypeptide has a structure represented by VH1-L5-VH2-L6-VL2-L7-VL1-L8-Fc and the second polypeptide has a structure represented by VH3-L13-VH4-L14-VL4-L15-VL3-L16-Fc. In some aspects, the invention is directed to an antigen binding polypeptide complex comprising a first polypeptide and a second polypeptide; wherein the first polypeptide has a structure represented by VL1-L1-VL2-L2-VH2-L3-VH1-L4-CH1-L5-Fc; VL1-L1-VH2-L2-VL2-L3-VH1-L4-CH1-L5-Fc; VH1-L6-VH2-L7-VL2-L8-VL1-L9-CH1-L10-Fc; VH1-L6-VL2-L7-VH2-L8-VL1-L9-CH1-L10-Fc; VL1-L11-VL2-L12-VH2-L13-VH1-L14-CL-L15-Fc; VL1-L11-VH2-L12-VL2-L13-VH1-L14-CL-L15-Fc; VH1-L16-VH2-L17-VL2-L18-VL1-L19-CL-L20-Fc; VH1-L16-VL2-L17-VH2-L18-VL1-L19-CL-L20-Fc; VL1-L21-VL2-L22-VH2-L23-VH1-L24-CH1-L25-CL-L26-Fc; VL1-L21-VH2-L22-VL2-L23-VH1-L24-CH1-L25-CL-L26-Fc; VH1-L27-VH2-L28-VL2-L29-VL1-L30-CH1-L31-CL-L32-Fc; VH1-L27-VL2-L28-VH2-L29-VL1-L30-CH1-L31-CL-L32-Fc; VL1-L33-VL2-L34-VH2-L35-VH1-L36-CL-L37-CH1-L38-Fc; VL1-L33-VH2-L34-VL2-L35-VH1-L36-CL-L37-CH1-L38-Fc; VH1-L39-VH2-L40-VL2-L41-VL1-L42-CL-L43-CH1-L44-Fc; or VH1-L39-VL2-L40-VH2-L41-VL1-L42-CL-L43-CH1-L44-Fc; wherein the second polypeptide has a structure represented by VL3-L45-VL4-L46-VH4-L47-VH3-L48-CH1-L49-Fc; VL3-L45-VH4-L46-VL4-L47-VH3-L48-CH1-L49-Fc; VH3-L50-VH4-L51-VL4-L52-VL3-L53-CH1-L54-Fc; VH3-L50-VL4-L51-VH4-L52-VL3-L53-CH1-L54-Fc; VL3-L55-VL4-L56-VH4-L57-VH3-L58-CL-L59-Fc; VL3-L55-VH4-L56-VL4-L57-VH3-L58-CL-L59-Fc; VH3-L60-VH4-L61-VL4-L62-VL3-L63-CL-L64-Fc; VH3-L60-VL4-L61-VH4-L62-VL3-L63-CL-L64-Fc; VL3-L65-VL4-L66-VH4-L67-VH3-L68-CH1-L69-CL-L70-Fc; VL3-L65-VH4-L66-VL4-L67-VH3-L68-CH1-L69-CL-L70-Fc; VH3-L71-VH4-L72-VL4-L73-VL3-L74-CH1-L75-CL-L76-Fc; VH3-L71-VL4-L72-VH4-L73-VL3-L74-CH1-L75-CL-L76-Fc; VL3-L77-VL4-L78-VH4-L79-VH3-L80-CL-L81-CH1-L82-Fc; VL3-L77-VH4-L78-VL4-L79-VH3-L80-CL-L81-CH1-L82-Fc; VH3-L83-VH4-L84-VL4-L85-VL3-L86-CL-L87-CH1-L88-Fc; or VH3-L83-VL4-L84-VH4-L85-VL3-L86-CL-L87-CH1-L88-Fc; wherein VL1 is a first immunoglobulin light chain variable region that specifically binds to a tumor-associated antigen; VL2 is a second immunoglobulin light chain variable region that specifically binds to a tumor-associated antigen; VL3 is a third immunoglobulin light chain variable region that specifically binds to CD3; VL4 is a fourth immunoglobulin light chain variable region that specifically binds to a tumor-associated antigen; VH1 is a first immunoglobulin heavy chain variable region that specifically binds to a tumor-associated antigen; VH2 is a second immunoglobulin heavy chain variable region that specifically binds to a tumor-associated antigen; VH3 is a third immunoglobulin heavy chain variable region that specifically binds to CD3; VH4 is a fourth immunoglobulin heavy chain variable region that specifically binds to a tumor-associated antigen; Fc is a region comprising an immunoglobulin heavy chain constant region 2 (CH2), an immunoglobulin heavy chain constant region 3 (CH3), and optionally, an immunoglobulin hinge; CH1 is an immunoglobulin heavy chain constant region 1; CL is an immunoglobulin light chain constant region; and L1-L88 are amino acid linkers. In some aspects, the first polypeptide has a structure represented by VL1-L1-VL2-L2-VH2-L3-VH1-L4-CH1-L5-Fc; VL1-L1-VH2-L2-VL2-L3-VH1-L4-CH1-L5-Fc; VH1-L6-VH2-L7-VL2-L8-VL1-L9-CH1-L10-Fc; VH1-L6-VL2-L7-VH2-L8-VL1-L9-CH1-L10-Fc; VL1-L11-VL2-L12-VH2-L13-VH1-L14-CL-L15-Fc; VL1-L11-VH2-L12-VL2-L13-VH1-L14-CL-L15-Fc; VH1-L16-VH2-L17-VL2-L18-VL1-L19-CL-L20-Fc; VH1-L16-VL2-L17-VH2-L18-VL1-L19-CL-L20-Fc; VL1-L21-VL2-L22-VH2-L23-VH1-L24-CH1-L25-CL-L26-Fc; VL1-L21-VH2-L22-VL2-L23-VH1-L24-CH1-L25-CL-L26-Fc; VH1-L27-VH2-L28-VL2-L29-VL1-L30-CH1-L31-CL-L32-Fc; VH1-L27-VL2-L28-VH2-L29-VL1-L30-CH1-L31-CL-L32-Fc; VL1-L33-VL2-L34-VH2-L35-VH1-L36-CL-L37-CH1-L38-Fc; VL1-L33-VH2-L34-VL2-L35-VH1-L36-CL-L37-CH1-L38-Fc; VH1-L39-VH2-L40-VL2-L41-VL1-L42-CL-L43-CH1-L44-Fc; or VH1-L39-VL2-L40-VH2-L41-VL1-L42-CL-L43-CH1-L44-Fc; and the second polypeptide has a structure represented by VL3-L45-VL4-L46-VH4-L47-VH3-L48-CH1-L49-Fc. In some aspects, the first polypeptide has a structure represented by VL1-L1-VL2-L2-VH2-L3-VH1-L4-CH1-L5-Fc; VL1-L1-VH2-L2-VL2-L3-VH1-L4-CH1-L5-Fc; VH1-L6-VH2-L7-VL2-L8-VL1-L9-CH1-L10-Fc; VH1-L6-VL2-L7-VH2-L8-VL1-L9-CH1-L10-Fc; VL1-L11-VL2-L12-VH2-L13-VH1-L14-CL-L15-Fc; VL1-L11-VH2-L12-VL2-L13-VH1-L14-CL-L15-Fc; VH1-L16-VH2-L17-VL2-L18-VL1-L19-CL-L20-Fc; VH1-L16-VL2-L17-VH2-L18-VL1-L19-CL-L20-Fc; VL1-L21-VL2-L22-VH2-L23-VH1-L24-CH1-L25-CL-L26-Fc; VL1-L21-VH2-L22-VL2-L23-VH1-L24-CH1-L25-CL-L26-Fc; VH1-L27-VH2-L28-VL2-L29-VL1-L30-CH1-L31-CL-L32-Fc; VH1-L27-VL2-L28-VH2-L29-VL1-L30-CH1-L31-CL-L32-Fc; VL1-L33-VL2-L34-VH2-L35-VH1-L36-CL-L37-CH1-L38-Fc; VL1-L33-VH2-L34-VL2-L35-VH1-L36-CL-L37-CH1-L38-Fc; VH1-L39-VH2-L40-VL2-L41-VL1-L42-CL-L43-CH1-L44-Fc; or VH1-L39-VL2-L40-VH2-L41-VL1-L42-CL-L43-CH1-L44-Fc; and the second polypeptide has a structure represented by VL3-L45-VH4-L46-VL4-L47-VH3-L48-CH1-L49-Fc. In some aspects, the first polypeptide has a structure represented by VL1-L1-VL2-L2-VH2-L3-VH1-L4-CH1-L5-Fc; VL1-L1-VH2-L2-VL2-L3-VH1-L4-CH1-L5-Fc; VH1-L6-VH2-L7-VL2-L8-VL1-L9-CH1-L10-Fc; VH1-L6-VL2-L7-VH2-L8-VL1-L9-CH1-L10-Fc; VL1-L11-VL2-L12-VH2-L13-VH1-L14-CL-L15-Fc; VL1-L11-VH2-L12-VL2-L13-VH1-L14-CL-L15-Fc; VH1-L16-VH2-L17-VL2-L18-VL1-L19-CL-L20-Fc; VH1-L16-VL2-L17-VH2-L18-VL1-L19-CL-L20-Fc; VL1-L21-VL2-L22-VH2-L23-VH1-L24-CH1-L25-CL-L26-Fc; VL1-L21-VH2-L22-VL2-L23-VH1-L24-CH1-L25-CL-L26-Fc; VH1-L27-VH2-L28-VL2-L29-VL1-L30-CH1-L31-CL-L32-Fc; VH1-L27-VL2-L28-VH2-L29-VL1-L30-CH1-L31-CL-L32-Fc; VL1-L33-VL2-L34-VH2-L35-VH1-L36-CL-L37-CH1-L38-Fc; VL1-L33-VH2-L34-VL2-L35-VH1-L36-CL-L37-CH1-L38-Fc; VH1-L39-VH2-L40-VL2-L41-VL1-L42-CL-L43-CH1-L44-Fc; or VH1-L39-VL2-L40-VH2-L41-VL1-L42-CL-L43-CH1-L44-Fc; and the second polypeptide has a structure represented by VH3-L50-VH4-L51-VL4-L52-VL3-L53-CH1-L54-Fc. In some aspects, the first polypeptide has a structure represented by VL1-L1-VL2-L2-VH2-L3-VH1-L4-CH1-L5-Fc; VL1-L1-VH2-L2-VL2-L3-VH1-L4-CH1-L5-Fc; VH1-L6-VH2-L7-VL2-L8-VL1-L9-CH1-L10-Fc; VH1-L6-VL2-L7-VH2-L8-VL1-L9-CH1-L10-Fc; VL1-L11-VL2-L12-VH2-L13-VH1-L14-CL-L15-Fc; VL1-L11-VH2-L12-VL2-L13-VH1-L14-CL-L15-Fc; VH1-L16-VH2-L17-VL2-L18-VL1-L19-CL-L20-Fc; VH1-L16-VL2-L17-VH2-L18-VL1-L19-CL-L20-Fc; VL1-L21-VL2-L22-VH2-L23-VH1-L24-CH1-L25-CL-L26-Fc; VL1-L21-VH2-L22-VL2-L23-VH1-L24-CH1-L25-CL-L26-Fc; VH1-L27-VH2-L28-VL2-L29-VL1-L30-CH1-L31-CL-L32-Fc; VH1-L27-VL2-L28-VH2-L29-VL1-L30-CH1-L31-CL-L32-Fc; VL1-L33-VL2-L34-VH2-L35-VH1-L36-CL-L37-CH1-L38-Fc; VL1-L33-VH2-L34-VL2-L35-VH1-L36-CL-L37-CH1-L38-Fc; VH1-L39-VH2-L40-VL2-L41-VL1-L42-CL-L43-CH1-L44-Fc; or VH1-L39-VL2-L40-VH2-L41-VL1-L42-CL-L43-CH1-L44-Fc; and the second polypeptide has a structure represented by VH3-L50-VL4-L51-VH4-L52-VL3-L53-CH1-L54-Fc. In some aspects, the first polypeptide has a structure represented by VL1-L1-VL2-L2-VH2-L3-VH1-L4-CH1-L5-Fc; VL1-L1-VH2-L2-VL2-L3-VH1-L4-CH1-L5-Fc; VH1-L6-VH2-L7-VL2-L8-VL1-L9-CH1-L10-Fc; VH1-L6-VL2-L7-VH2-L8-VL1-L9-CH1-L10-Fc; VL1-L11-VL2-L12-VH2-L13-VH1-L14-CL-L15-Fc; VL1-L11-VH2-L12-VL2-L13-VH1-L14-CL-L15-Fc; VH1-L16-VH2-L17-VL2-L18-VL1-L19-CL-L20-Fc; VH1-L16-VL2-L17-VH2-L18-VL1-L19-CL-L20-Fc; VL1-L21-VL2-L22-VH2-L23-VH1-L24-CH1-L25-CL-L26-Fc; VL1-L21-VH2-L22-VL2-L23-VH1-L24-CH1-L25-CL-L26-Fc; VH1-L27-VH2-L28-VL2-L29-VL1-L30-CH1-L31-CL-L32-Fc; VH1-L27-VL2-L28-VH2-L29-VL1-L30-CH1-L31-CL-L32-Fc; VL1-L33-VL2-L34-VH2-L35-VH1-L36-CL-L37-CH1-L38-Fc; VL1-L33-VH2-L34-VL2-L35-VH1-L36-CL-L37-CH1-L38-Fc; VH1-L39-VH2-L40-VL2-L41-VL1-L42-CL-L43-CH1-L44-Fc; or VH1-L39-VL2-L40-VH2-L41-L1-L42-CL-L43-CH1-L44-Fc; and the second polypeptide has a structure represented by VL3-L55-VL4-L56-VH4-L57-VH3-L58-CL-L59-Fc. In some aspects, the first polypeptide has a structure represented by VL1-L1-VL2-L2-VH2-L3-VH1-L4-CH1-L5-Fc; VL1-L1-VH2-L2-VL2-L3-VH1-L4-CH1-L5-Fc; VH1-L6-VH2-L7-VL2-L8-VL1-L9-CH1-L10-Fc; VH1-L6-VL2-L7-VH2-L8-VL1-L9-CH1-L10-Fc; VL1-L11-VL2-L12-VH2-L13-VH1-L14-CL-L15-Fc; VL1-L11-VH2-L12-VL2-L13-VH1-L14-CL-L15-Fc; VH1-L16-VH2-L17-VL2-L18-VL1-L19-CL-L20-Fc; VH1-L16-VL2-L17-VH2-L18-VL1-L19-CL-L20-Fc; VL1-L21-VL2-L22-VH2-L23-VH1-L24-CH1-L25-CL-L26-Fc; VL1-L21-VH2-L22-VL2-L23-VH1-L24-CH1-L25-CL-L26-Fc; VH1-L27-VH2-L28-VL2-L29-VL1-L30-CH1-L31-CL-L32-Fc; VH1-L27-VL2-L28-VH2-L29-VL1-L30-CH1-L31-CL-L32-Fc; VL1-L33-VL2-L34-VH2-L35-VH1-L36-CL-L37-CH1-L38-Fc; VL1-L33-VH2-L34-VL2-L35-VH1-L36-CL-L37-CH1-L38-Fc; VH1-L39-VH2-L40-VL2-L41-VL1-L42-CL-L43-CH1-L44-Fc; or VH1-L39-VL2-L40-VH2-L41-VL1-L42-CL-L43-CH1-L44-Fc; and the second polypeptide has a structure represented by VL3-L55-VH4-L56-VL4-L57-VH3-L58-CL-L59-Fc. In some aspects, the first polypeptide has a structure represented by VL1-L1-VL2-L2-VH2-L3-VH1-L4-CH1-L5-Fc; VL1-L1-VH2-L2-VL2-L3-VH1-L4-CH1-L5-Fc; VH1-L6-VH2-L7-VL2-L8-VL1-L9-CH1-L10-Fc; VH1-L6-VL2-L7-VH2-L8-VL1-L9-CH1-L10-Fc; VL1-L11-VL2-L12-VH2-L13-VH1-L14-CL-L15-Fc; VL1-L11-VH2-L12-VL2-L13-VH1-L14-CL-L15-Fc; VH1-L16-VH2-L17-VL2-L18-VL1-L19-CL-L20-Fc; VH1-L16-VL2-L17-VH2-L18-VL1-L19-CL-L20-Fc; VL1-L21-VL2-L22-VH2-L23-VH1-L24-CH1-L25-CL-L26-Fc; VL1-L21-VH2-L22-VL2-L23-VH1-L24-CH1-L25-CL-L26-Fc; VH1-L27-VH2-L28-VL2-L29-VL1-L30-CH1-L31-CL-L32-Fc; VH1-L27-VL2-L28-VH2-L29-VL1-L30-CH1-L31-CL-L32-Fc; VL1-L33-VL2-L34-VH2-L35-VH1-L36-CL-L37-CH1-L38-Fc; VL1-L33-VH2-L34-VL2-L35-VH1-L36-CL-L37-CH1-L38-Fc; VH1-L39-VH2-L40-VL2-L41-VL1-L42-CL-L43-CH1-L44-Fc; or VH1-L39-VL2-L40-VH2-L41-VL1-L42-CL-L43-CH1-L44-Fc; and the second polypeptide has a structure represented by VH3-L60-VH4-L61-VL4-L62-VL3-L63-CL-L64-Fc. In some aspects, the first polypeptide has a structure represented by VL1-L1-VL2-L2-VH2-L3-VH1-L4-CH1-L5-Fc; VL1-L1-VH2-L2-VL2-L3-VH1-L4-CH1-L5-Fc; VH1-L6-VH2-L7-VL2-L8-VL1-L9-CH1-L10-Fc; VH1-L6-VL2-L7-VH2-L8-VL1-L9-CH1-L10-Fc; VL1-L11-VL2-L12-VH2-L13-VH1-L14-CL-L15-Fc; VL1-L11-VH2-L12-VL2-L13-VH1-L14-CL-L15-Fc; VH1-L16-VH2-L17-VL2-L18-VL1-L19-CL-L20-Fc; VH1-L16-VL2-L17-VH2-L18-VL1-L19-CL-L20-Fc; VL1-L21-VL2-L22-VH2-L23-VH1-L24-CH1-L25-CL-L26-Fc; VL1-L21-VH2-L22-VL2-L23-VH1-L24-CH1-L25-CL-L26-Fc; VH1-L27-VH2-L28-VL2-L29-VL1-L30-CH1-L31-CL-L32-Fc; VH1-L27-VL2-L28-VH2-L29-VL1-L30-CH1-L31-CL-L32-Fc; VL1-L33-VL2-L34-VH2-L35-VH1-L36-CL-L37-CH1-L38-Fc; VL1-L33-VH2-L34-VL2-L35-VH1-L36-CL-L37-CH1-L38-Fc; VH1-L39-VH2-L40-VL2-L41-VL1-L42-CL-L43-CH1-L44-Fc; or VH1-L39-VL2-L40-VH2-L41-VL1-L42-CL-L43-CH1-L44-Fc; and the second polypeptide has a structure represented by VH3-L60-VL4-L61-VH4-L62-VL3-L63-CL-L64-Fc. In some aspects, the first polypeptide has a structure represented by VL1-L1-VL2-L2-VH2-L3-VH1-L4-CH1-L5-Fc; VL1-L1-VH2-L2-VL2-L3-VH1-L4-CH1-L5-Fc; VH1-L6-VH2-L7-VL2-L8-VL1-L9-CH1-L10-Fc; VH1-L6-VL2-L7-VH2-L8-VL1-L9-CH1-L10-Fc; VL1-L11-VL2-L12-VH2-L13-VH1-L14-CL-L15-Fc; VL1-L11-VH2-L12-VL2-L13-VH1-L14-CL-L15-Fc; VH1-L16-VH2-L17-VL2-L18-VL1-L19-CL-L20-Fc; VH1-L16-VL2-L17-VH2-L18-VL1-L19-CL-L20-Fc; VL1-L21-VL2-L22-VH2-L23-VH1-L24-CH1-L25-CL-L26-Fc; VL1-L21-VH2-L22-VL2-L23-VH1-L24-CH1-L25-CL-L26-Fc; VH1-L27-VH2-L28-VL2-L29-VL1-L30-CH1-L31-CL-L32-Fc; VH1-L27-VL2-L28-VH2-L29-VL1-L30-CH1-L31-CL-L32-Fc; VL1-L33-VL2-L34-VH2-L35-VH1-L36-CL-L37-CH1-L38-Fc; VL1-L33-VH2-L34-VL2-L35-VH1-L36-CL-L37-CH1-L38-Fc; VH1-L39-VH2-L40-VL2-L41-VL1-L42-CL-L43-CH1-L44-Fc; or VH1-L39-VL2-L40-VH2-L41-VL1-L42-CL-L43-CH1-L44-Fc; and the second polypeptide has a structure represented by VL3-L65-VL4-L66-VH4-L67-VH3-L68-CH1-L69-CL-L70-Fc. In some aspects, the first polypeptide has a structure represented by VL1-L1-VL2-L2-VH2-L3-VH1-L4-CH1-L5-Fc; VL1-L1-VH2-L2-VL2-L3-VH1-L4-CH1-L5-Fc; VH1-L6-VH2-L7-VL2-L8-VL1-L9-CH1-L10-Fc; VH1-L6-VL2-L7-VH2-L8-VL1-L9-CH1-L10-Fc; VL1-L11-VL2-L12-VH2-L13-VH1-L14-CL-L15-Fc; VL1-L11-VH2-L12-VL2-L13-VH1-L14-CL-L15-Fc; VH1-L16-VH2-L17-VL2-L18-VL1-L19-CL-L20-Fc; VH1-L16-VL2-L17-VH2-L18-VL1-L19-CL-L20-Fc; VL1-L21-VL2-L22-VH2-L23-VH1-L24-CH1-L25-CL-L26-Fc; VL1-L21-VH2-L22-VL2-L23-VH1-L24-CH1-L25-CL-L26-Fc; VH1-L27-VH2-L28-VL2-L29-VL1-L30-CH1-L31-CL-L32-Fc; VH1-L27-VL2-L28-VH2-L29-VL1-L30-CH1-L31-CL-L32-Fc; VL1-L33-VL2-L34-VH2-L35-VH1-L36-CL-L37-CH1-L38-Fc; VL1-L33-VH2-L34-VL2-L35-VH1-L36-CL-L37-CH1-L38-Fc; VH1-L39-VH2-L40-VL2-L41-VL1-L42-CL-L43-CH1-L44-Fe; or VH1-L39-VL2-L40-VH2-L41-VL1-L42-CL-L43-CH1-L44-Fc; and the second polypeptide has a structure represented by VL3-L65-VH4-L66-VL4-L67-VH3-L68-CH1-L69-CL-L70-Fc. In some aspects, the first polypeptide has a structure represented by VL1-L1-VL2-L2-VH2-L3-VH1-L4-CH1-L5-Fc; VL1-L1-VH2-L2-VL2-L3-VH1-L4-CH1-L5-Fc; VH1-L6-VH2-L7-VL2-L8-VL1-L9-CH1-L10-Fc; VH1-L6-VL2-L7-VH2-L8-VL1-L9-CH1-L10-Fc; VL1-L11-VL2-L12-VH2-L13-VH1-L14-CL-L15-Fc; VL1-L11-VH2-L12-VL2-L13-VH1-L14-CL-L15-Fc; VH1-L16-VH2-L17-VL2-L18-VL1-L19-CL-L20-Fc; VH1-L16-VL2-L17-VH2-L18-VL1-L19-CL-L20-Fc; VL1-L21-VL2-L22-VH2-L23-VH1-L24-CH1-L25-CL-L26-Fc; VL1-L21-VH2-L22-VL2-L23-VH1-L24-CH1-L25-CL-L26-Fc; VH1-L27-VH2-L28-VL2-L29-VL1-L30-CH1-L31-CL-L32-Fc; VH1-L27-VL2-L28-VH2-L29-VL1-L30-CH1-L31-CL-L32-Fc; VL1-L33-VL2-L34-VH2-L35-VH1-L36-CL-L37-CH1-L38-Fc; VL1-L33-VH2-L34-VL2-L35-VH1-L36-CL-L37-CH1-L38-Fc; VH1-L39-VH2-L40-VL2-L41-VL1-L42-CL-L43-CH1-L44-Fc; or VH1-L39-VL2-L40-VH2-L41-VL1-L42-CL-L43-CH1-L44-Fc; and the second polypeptide has a structure represented by VH3-L71-VH4-L72-VL4-L73-VL3-L74-CH1-L75-CL-L76-Fc. In some aspects, the first polypeptide has a structure represented by VL1-L1-VL2-L2-VH2-L3-VH1-L4-CH1-L5-Fc; VL1-L1-VH2-L2-VL2-L3-VH1-L4-CH1-L5-Fc; VH1-L6-VH2-L7-VL2-L8-VL1-L9-CH1-L10-Fc; VH1-L6-VL2-L7-VH2-L8-VL1-L9-CH1-L10-Fc; VL1-L11-VL2-L12-VH2-L13-VH1-L14-CL-L15-Fc; VL1-L11-VH2-L12-VL2-L13-VH1-L14-CL-L15-Fc; VH1-L16-VH2-L17-VL2-L18-VL1-L19-CL-L20-Fc; VH1-L16-VL2-L17-VH2-L18-VL1-L19-CL-L20-Fc; VL1-L21-VL2-L22-VH2-L23-VH1-L24-CH1-L25-CL-L26-Fc; VL1-L21-VH2-L22-VL2-L23-VH1-L24-CH1-L25-CL-L26-Fc; VH1-L27-VH2-L28-VL2-L29-VL1-L30-CH1-L31-CL-L32-Fc; VH1-L27-VL2-L28-VH2-L29-VL1-L30-CH1-L31-CL-L32-Fc; VL1-L33-VL2-L34-VH2-L35-VH1-L36-CL-L37-CH1-L38-Fc; VL1-L33-VH2-L34-VL2-L35-VH1-L36-CL-L37-CH1-L38-Fc; VH1-L39-VH2-L40-VL2-L41-VL1-L42-CL-L43-CH1-L44-Fc; or VH1-L39-VL2-L40-VH2-L41-VL1-L42-CL-L43-CH1-L44-Fc; and the second polypeptide has a structure represented by VH3-L71-VL4-L72-VH4-L73-VL3-L74-CH1-L75-CL-L76-Fc. In some aspects, the first polypeptide has a structure represented by VL1-L1-VL2-L2-VH2-L3-VH1-L4-CH1-L5-Fc; VL1-L1-VH2-L2-VL2-L3-VH1-L4-CH1-L5-Fc; VH1-L6-VH2-L7-VL2-L8-VL1-L9-CH1-L10-Fc; VH1-L6-VL2-L7-VH2-L8-VL1-L9-CH1-L10-Fc; VL1-L11-VL2-L12-VH2-L13-VH1-L14-CL-L15-Fc; VL1-L11-VH2-L12-VL2-L13-VH1-L14-CL-L15-Fc; VH1-L16-VH2-L17-VL2-L18-VL1-L19-CL-L20-Fc; VH1-L16-VL2-L17-VH2-L18-VL1-L19-CL-L20-Fc; VL1-L21-VL2-L22-VH2-L23-VH1-L24-CH1-L25-CL-L26-Fc; VL1-L21-VH2-L22-VL2-L23-VH1-L24-CH1-L25-CL-L26-Fc; VH1-L27-VH2-L28-VL2-L29-VL1-L30-CH1-L31-CL-L32-Fc; VH1-L27-VL2-L28-VH2-L29-VL1-L30-CH1-L31-CL-L32-Fc; VL1-L33-VL2-L34-VH2-L35-VH1-L36-CL-L37-CH1-L38-Fc; VL1-L33-VH2-L34-VL2-L35-VH1-L36-CL-L37-CH1-L38-Fc; VH1-L39-VH2-L40-VL2-L41-VL1-L42-CL-L43-CH1-L44-Fc; or VH1-L39-VL2-L40-VH2-L41-VL1-L42-CL-L43-CH1-L44-Fc; and the second polypeptide has a structure represented by VL3-L77-VL4-L78-VH4-L79-VH3-L80-CL-L81-CH1-L82-Fc. In some aspects, the first polypeptide has a structure represented by VL1-L1-VL2-L2-VH2-L3-VH1-L4-CH1-L5-Fc; VL1-L1-VH2-L2-VL2-L3-VH1-L4-CH1-L5-Fc; VH1-L6-VH2-L7-VL2-L8-VL1-L9-CH1-L10-Fc; VH1-L6-VL2-L7-VH2-L8-VL1-L9-CH1-L10-Fc; VL1-L11-VL2-L12-VH2-L13-VH1-L14-CL-L15-Fc; VL1-L11-VH2-L12-VL2-L13-VH1-L14-CL-L15-Fc; VH1-L16-VH2-L17-VL2-L18-VL1-L19-CL-L20-Fc; VH1-L16-VL2-L17-VH2-L18-VL1-L19-CL-L20-Fc; VL1-L21-VL2-L22-VH2-L23-VH1-L24-CH1-L25-CL-L26-Fc; VL1-L21-VH2-L22-VL2-L23-VH1-L24-CH1-L25-CL-L26-Fc; VH1-L27-VH2-L28-VL2-L29-VL1-L30-CH1-L31-CL-L32-Fc; VH1-L27-VL2-L28-VH2-L29-VL1-L30-CH1-L31-CL-L32-Fc; VL1-L33-VL2-L34-VH2-L35-VH1-L36-CL-L37-CH1-L38-Fc; VL1-L33-VH2-L34-VL2-L35-VH1-L36-CL-L37-CH1-L38-Fc; VH1-L39-VH2-L40-VL2-L41-VL1-L42-CL-L43-CH1-L44-Fc; or VH1-L39-VL2-L40-VH2-L41-VL1-L42-CL-L43-CH1-L44-Fc; and the second polypeptide has a structure represented by VL3-L77-VH4-L78-VL4-L79-VH3-L80-CL-L81-CH1-L82-Fc. In some aspects, the first polypeptide has a structure represented by VL1-L1-VL2-L2-VH2-L3-VH1-L4-CH1-L5-Fc; VL1-L1-VH2-L2-VL2-L3-VH1-L4-CH1-L5-Fc; VH1-L6-VH2-L7-VL2-L8-VL1-L9-CH1-L10-Fc; VH1-L6-VL2-L7-VH2-L8-VL1-L9-CH1-L10-Fc; VL1-L11-VL2-L12-VH2-L13-VH1-L14-CL-L15-Fc; VL1-L11-VH2-L12-VL2-L13-VH1-L14-CL-L15-Fc; VH1-L16-VH2-L17-VL2-L18-VL1-L19-CL-L20-Fc; VH1-L16-VL2-L17-VH2-L18-VL1-L19-CL-L20-Fc; VL1-L21-VL2-L22-VH2-L23-VH1-L24-CH1-L25-CL-L26-Fc; VL1-L21-VH2-L22-VL2-L23-VH1-L24-CH1-L25-CL-L26-Fc; VH1-L27-VH2-L28-VL2-L29-VL1-L30-CH1-L31-CL-L32-Fc; VH1-L27-VL2-L28-VH2-L29-VL1-L30-CH1-L31-CL-L32-Fc; VL1-L33-VL2-L34-VH2-L35-VH1-L36-CL-L37-CH1-L38-Fc; VL1-L33-VH2-L34-VL2-L35-VH1-L36-CL-L37-CH1-L38-Fc; VH1-L39-VH2-L40-VL2-L41-VL1-L42-CL-L43-CH1-L44-Fc; or VH1-L39-VL2-L40-VH2-L41-VL1-L42-CL-L43-CH1-L44-Fc; and the second polypeptide has a structure represented by VH3-L83-VH4-L84-VL4-L85-VL3-L86-CL-L87-CH1-L88-Fc. In some aspects, the first polypeptide has a structure represented by VL1-L1-VL2-L2-VH2-L3-VH1-L4-CH1-L5-Fc; VL1-L1-VH2-L2-VL2-L3-VH1-L4-CH1-L5-Fc; VH1-L6-VH2-L7-VL2-L8-VL1-L9-CH1-L10-Fc; VH1-L6-VL2-L7-VH2-L8-VL1-L9-CH1-L10-Fc; VL1-L11-VL2-L12-VH2-L13-VH1-L14-CL-L15-Fc; VL1-L11-VH2-L12-VL2-L13-VH1-L14-CL-L15-Fc; VH1-L16-VH2-L17-VL2-L18-VL1-L19-CL-L20-Fc; VH1-L16-VL2-L17-VH2-L18-VL1-L19-CL-L20-Fc; VL1-L21-VL2-L22-VH2-L23-VH1-L24-CH1-L25-CL-L26-Fc; VL1-L21-VH2-L22-VL2-L23-VH1-L24-CH1-L25-CL-L26-Fc; VH1-L27-VH2-L28-VL2-L29-VL1-L30-CH1-L31-CL-L32-Fc; VH1-L27-VL2-L28-VH2-L29-VL1-L30-CH1-L31-CL-L32-Fc; VL1-L33-VL2-L34-VH2-L35-VH1-L36-CL-L37-CH1-L38-Fc; VL1-L33-VH2-L34-VL2-L35-VH1-L36-CL-L37-CH1-L38-Fc; VH1-L39-VH2-L40-VL2-L41-VL1-L42-CL-L43-CH1-L44-Fc; or VH1-L39-VL2-L40-VH2-L41-VL1-L42-CL-L43-CH1-L44-Fc; and the second polypeptide has a structure represented by VH3-L83-VL4-L84-VH4-L85-VL3-L86-CL-L87-CH1-L88-Fc. In some aspects, the first polypeptide has a structure represented by: VL1-L1-VL2-L2-VH2-L3-VH1-L4-CH1-L5-Fc; VH1-L6-VH2-L7-VL2-L8-VL1-L9-CH1-L10-Fc; VL1-L11-VL2-L12-VH2-L13-VH1-L14-CL-L15-Fc; VH1-L16-VH2-L17-VL2-L18-VL1-L19-CL-L20-Fc; VL1-L21-VL2-L22-VH2-L23-VH1-L24-CH1-L25-CL-L26-Fc; VH1-L27-VH2-L28-VL2-L29-VL1-L30-CH1-L31-CL-L32-Fc; VL1-L33-VL2-L34-VH2-L35-VH1-L36-CL-L37-CH1-L38-Fc; or VH1-L39-VH2-L40-VL2-L41-VL1-L42-CL-L43-CH1-L44-Fc; and the second polypeptide has a structure represented by: VL3-L45-VL4-L46-VH4-L47-VH3-L48-CH1-L49-Fc; VH3-L50-VH4-L51-VL4-L52-VL3-L53-CH1-L54-Fc; VL3-L55-VL4-L56-VH4-L57-VH3-L58-CL-L59-Fc; VH3-L60-VH4-L61-VL4-L62-VL3-L63-CL-L64-Fc; VL3-L65-VL4-L66-VH4-L67-VH3-L68-CH1-L69-CL-L70-Fc; VH3-L71-VH4-L72-VL4-L73-VL3-L74-CH1-L75-CL-L76-Fc; VL3-L77-VL4-L78-VH4-L79-VH3-L80-CL-L81-CH1-L82-Fc; or VH3-L83-VH4-L84-VL4-L85-VL3-L86-CL-L87-CH1-L88-Fc.

[0136] In other some aspects, the invention is directed to an antigen binding polypeptide complex comprising a first polypeptide and a second polypeptide; wherein the first polypeptide has a structure represented by VL1-L1-VL2-L2-VH2-L3-VH1-L4-Fc; or VL1-L1-VH2-L2-VL2-L3-VH1-L4-Fc; or VH1-L5-VH2-L6-VL2-L7-VL1-L8-Fc; or VH1-L5-VL2-L6-VH2-L7-VL1-L8-Fc; wherein the second polypeptide has a structure represented by VL3-L9-VL4-L10-VH4-L11-VH3-L12-Fc; or VL3-L9-VH4-L10-VL4-L11-VH3-L12-Fc; or VH3-L13-VH4-L14-VL4-L15-VL3-L16-Fc; or VH3-L13-VL4-L14-VH4-L15-VL3-L16-Fc; wherein VL1 is a first immunoglobulin light chain variable region; VL2 is a second immunoglobulin light chain variable region; VL3 is a third immunoglobulin light chain variable region; VL4 is a fourth immunoglobulin light chain variable region; VH1 is a first immunoglobulin heavy chain variable region; VH2 is a second immunoglobulin heavy chain variable region; VH3 is a third immunoglobulin heavy chain variable region; VH4 is a fourth immunoglobulin heavy chain variable region; Fc is a region comprising an immunoglobulin heavy chain constant region 2 (CH2), an immunoglobulin heavy chain constant region 3 (CH3), and optionally, an immunoglobulin hinge; and L1-L16 are amino acid linkers. In some aspects, the first polypeptide has a structure represented by VL1-L1-VL2-L2-VH2-L3-VH1-L4-Fc; VL1-L1-VH2-L2-VL2-L3-VH1-L4-Fc; VH1-L5-VH2-L6-VL2-L7-VL1-L8-Fc; or VH1-L5-VL2-L6-VH2-L7-VL1-L8-Fc and the second polypeptide has a structure represented by VL3-L9-VL4-L10-VH4-L11-VH3-L12-Fc. In some aspects, the first polypeptide has a structure represented by VL1-L1-VL2-L2-VH2-L3-VH1-L4-Fc; or VL1-L1-VH2-L2-VL2-L3-VH1-L4-Fc or VH1-L5-VH2-L6-VL2-L7-VL1-L8-Fc or VH1-L5-VL2-L6-VH2-L7-VL1-L8-Fc and the second polypeptide has a structure represented by VL3-L9-VH4-L10-VL4-L11-VH3-L12-Fc. In some aspects, the first polypeptide has a structure represented by VL1-L1-VL2-L2-VH2-L3-VH1-L4-Fc; or VL1-L1-VH2-L2-VL2-L3-VH1-L4-Fc or VH1-L5-VH2-L6-VL2-L7-VL1-L8-Fc or VH1-L5-VL2-L6-VH2-L7-VL1-L8-Fc and the second polypeptide has a structure represented by VH3-L13-VH4-L14-VL4-L15-VL3-L16-Fc. In some aspects, the first polypeptide has a structure represented by VL1-L1-VL2-L2-VH2-L3-VH1-L4-Fc; or VL1-L1-VH2-L2-VL2-L3-VH1-L4-Fc or VH1-L5-VH2-L6-VL2-L7-VL1-L8-Fc or VH1-L5-VL2-L6-VH2-L7-VL1-L8-Fc and the second polypeptide has a structure represented by VH3-L13-VL4-L14-VH4-L15-VL3-L16-Fc. In some aspects, the first polypeptide has a structure represented by VL1-L1-VL2-L2-VH2-L3-VH1-L4-Fc or VH1-L5-VH2-L6-VL2-L7-VL1-L8-Fc; and the second polypeptide has a structure represented by VL3-L9-VL4-L10-VH4-L11-VH3-L12-Fc or VH3-L13-VH4-L14-VL4-L15-VL3-L16-Fc. In some aspects, the first polypeptide has a structure represented by VL1-L1-VL2-L2-VH2-L3-VH1-L4-Fc and the second polypeptide has a structure represented by VL3-L9-VL4-L10-VH4-L11-VH3-L12-Fc. In some aspects, the first polypeptide has a structure represented by VL1-L1-VL2-L2-VH2-L3-VH1-L4-Fc and the second polypeptide has a structure represented by VH3-L13-VH4-L14-VL4-L15-VL3-L16-Fc. In some aspects, the first polypeptide has a structure represented by VH1-L5-VH2-L6-VL2-L7-VL1-L8-Fc and the second polypeptide has a structure represented by VL3-L9-VL4-L10-VH4-L11-VH3-L12-Fc. In some aspects, the first polypeptide has a structure represented by VH1-L5-VH2-L6-VL2-L7-VL1-L8-Fc and the second polypeptide has a structure represented by VH3-L13-VH4-L14-VL4-L15-VL3-L16-Fc.

[0137] In other some aspects, the invention is directed to an antigen binding polypeptide complex comprising a first polypeptide and a second polypeptide; wherein the first polypeptide has a structure represented by VL1-L1-VL2-L2-VH2-L3-VH1-L4-Fc; or VL1-L1-VH2-L2-VL2-L3-VH1-L4-Fc; or VH1-L5-VH2-L6-VL2-L7-VL1-L8-Fc; or VH1-L5-VL2-L6-VH2-VL1-L8-Fc; wherein the second polypeptide has a structure represented by VL3-L9-VL4-L10-VH4-L11-VH3-L12-Fc; or VL3-L9-VH4-L10-VL4-L11-VH3-L12-Fc; or VH3-L13-VH4-L14-VL4-L15-VL3-L16-Fc; or VH3-L13-VL4-L14-VH4-L15-VL3-L16-Fc; wherein VL1 is a first immunoglobulin light chain variable region; VL2 is a second immunoglobulin light chain variable region; VL3 is a third immunoglobulin light chain variable region; VL4 is a fourth immunoglobulin light chain variable region; VH1 is a first immunoglobulin heavy chain variable region; VH2 is a second immunoglobulin heavy chain variable region; VH3 is a third immunoglobulin heavy chain variable region; VH4 is a fourth immunoglobulin heavy chain variable region; Fe is a region comprising an immunoglobulin heavy chain constant region 2 (CH2), an immunoglobulin heavy chain constant region 3 (CH3), and optionally, an immunoglobulin hinge; and L1-L16 are amino acid linkers. In some aspects, the first polypeptide has a structure represented by VL1-L1-VL2-L2-VH2-L3-VH1-L4-Fc; VL1-L1-VH2-L2-VL2-L3-VH1-L4-Fc; VH1-L5-VH2-L6-VL2-L7-VL1-L8-Fc; or VH1-L5-VL2-L6-VH2-VL1-L8-Fc; and the second polypeptide has a structure represented by VL3-L9-VL4-L10-VH4-L11-VH3-L12-Fc. In some aspects, the first polypeptide has a structure represented by VL1-L1-VL2-L2-VH2-L3-VH1-L4-Fc; VL1-L1-VH2-L2-VL2-L3-VH1-L4-Fc; VH1-L5-VH2-L6-VL2-L7-VL1-L8-Fc; or VH1-L5-VL2-L6-VH2-VL1-L8-Fc; and the second polypeptide has a structure represented by VL3-L9-VH4-L10-VL4-L11-VH3-L12-Fc. In some aspects, the first polypeptide has a structure represented by VL1-L1-VL2-L2-VH2-L3-VH1-L4-Fc; VL1-L1-VH2-L2-VL2-L3-VH1-L4-Fc; VH1-L5-VH2-L6-VL2-L7-VL1-L8-Fc; or VH1-L5-VL2-L6-VH2-VL1-L8-Fc; and the second polypeptide has a structure represented by VH3-L13-VH4-L14-VL4-L15-VL3-L16-Fc. In some aspects, the first polypeptide has a structure represented by VL1-L1-VL2-L2-VH2-L3-VH1-L4-Fc; VL1-L1-VH2-L2-VL2-L3-VH1-L4-Fc; VH1-L5-VH2-L6-VL2-L7-VL1-L8-Fc; or VH1-L5-VL2-L6-VH2-VL1-L8-Fc; and the second polypeptide has a structure represented by VH3-L13-VL4-L14-VH4-L15-VL3-L16-Fc. In some aspects, the first polypeptide has a structure represented by VL1-L1-VL2-L2-VH2-L3-VH1-L4-Fe or VH1-L5-VH2-L6-VL2-L7-VL1-L8-Fc; and the second polypeptide has a structure represented by VL3-L9-VL4-L10-VH4-L11-VH3-L12-Fc or VH3-L13-VH4-L14-VL4-L15-VL3-L16-Fc. In some aspects, the first polypeptide has a structure represented by VL1-L1-VL2-L2-VH2-L3-VH1-L4-Fc and the second polypeptide has a structure represented by VL3-L9-VL4-L10-VH4-L11-VH3-L12-Fc. In some aspects, the first polypeptide has a structure represented by VL1-L1-VL2-L2-VH2-L3-VH1-L4-Fc and the second polypeptide has a structure represented by VH3-L13-VH4-L14-VL4-L15-VL3-L16-Fc. In some aspects, the first polypeptide has a structure represented by VH1-L5-VH2-L6-VL2-L7-VL1-L8-Fc and the second polypeptide has a structure represented by VL3-L9-VL4-L10-VH4-L11-VH3-L12-Fc. In some aspects, the first polypeptide has a structure represented by VH1-L5-VH2-L6-VL2-L7-VL1-L8-Fc and the second polypeptide has a structure represented by VH3-L13-VH4-L14-VL4-L15-VL3-L16-Fc.

[0138] In some aspects, the invention is directed to an antigen binding polypeptide complex comprising a first polypeptide and a second polypeptide; wherein the first polypeptide has a structure represented by VL1-L1-VL2-L2-VH2-L3-VH1-L4-CH1-L5-Fc; VL1-L1-VH2-L2-VL2-L3-VH1-L4-CH1-L5-Fc; VH1-L6-VH2-L7-VL2-L8-VL1-L9-CH1-L10-Fc; VH1-L6-VL2-L7-VH2-L8-VL1-L9-CH1-L10-Fc; VL1-L11-VL2-L12-VH2-L13-VH1-L14-CL-L15-Fc; VL1-L11-VH2-L12-VL2-L13-VH1-L14-CL-L15-Fc; VH1-L16-VH2-L17-VL2-L18-VL1-L19-CL-L20-Fc; VH1-L16-VL2-L17-VH2-L18-VL1-L19-CL-L20-Fc; VL1-L21-VL2-L22-VH2-L23-VH1-L24-CH1-L25-CL-L26-Fc; VL1-L21-VH2-L22-VL2-L23-VH1-L24-CH1-L25-CL-L26-Fc; VH1-L27-VH2-L28-VL2-L29-VL1-L30-CH1-L31-CL-L32-Fc; VH1-L27-VL2-L28-VH2-L29-VL1-L30-CH1-L31-CL-L32-Fc; VL1-L33-VL2-L34-VH2-L35-VH1-L36-CL-L37-CH1-L38-Fc; VL1-L33-VH2-L34-VL2-L35-VH1-L36-CL-L37-CH1-L38-Fc; VH1-L39-VH2-L40-VL2-L41-VL1-L42-CL-L43-CH1-L44-Fc; or VH1-L39-VL2-L40-VH2-L41-VL1-L42-CL-L43-CH1-L44-Fc; wherein the second polypeptide has a structure represented by VL3-L45-VL4-L46-VH4-L47-VH3-L48-CH1-L49-Fc; VL3-L45-VH4-L46-VL4-L47-VH3-L48-CH1-L49-Fc; VH3-L50-VH4-L51-VL4-L52-VL3-L53-CH1-L54-Fc; VH3-L50-VL4-L51-VH4-L52-VL3-L53-CH1-L54-Fc; VL3-L55-VL4-L56-VH4-L57-VH3-L58-CL-L59-Fc; VL3-L55-VH4-L56-VL4-L57-VH3-L58-CL-L59-Fc; VH3-L60-VH4-L61-VL4-L62-VL3-L63-CL-L64-Fc; VH3-L60-VL4-L61-VH4-L62-VL3-L63-CL-L64-Fc; VL3-L65-VL4-L66-VH4-L67-VH3-L68-CH1-L69-CL-L70-Fc; VL3-L65-VH4-L66-VL4-L67-VH3-L68-CH1-L69-CL-L70-Fc; VH3-L71-VH4-L72-VL4-L73-VL3-L74-CH1-L75-CL-L76-Fc; VH3-L71-VL4-L72-VH4-L73-VL3-L74-CH1-L75-CL-L76-Fc; VL3-L77-VL4-L78-VH4-L79-VH3-L80-CL-L81-CH1-L82-Fc; VL3-L77-VH4-L78-VL4-L79-VH3-L80-CL-L81-CH1-L82-Fc; VH3-L83-VH4-L84-VL4-L85-VL3-L86-CL-L87-CH1-L88-Fc; or VH3-L83-VL4-L84-VH4-L85-VL3-L86-CL-L87-CH1-L88-Fc; wherein VL1 is a first immunoglobulin light chain variable region that specifically binds to a tumor-associated antigen; VL2 is a second immunoglobulin light chain variable region that specifically binds to a tumor-associated antigen; VL3 is a third immunoglobulin light chain variable region that specifically binds to a tumor-associated antigen; VL4 is a fourth immunoglobulin light chain variable region that specifically binds to CD3; VH1 is a first immunoglobulin heavy chain variable region that specifically binds to a tumor-associated antigen; VH2 is a second immunoglobulin heavy chain variable region that specifically binds to a tumor-associated antigen; VH3 is a third immunoglobulin heavy chain variable region that specifically binds to a tumor-associated antigen; VH4 is a fourth immunoglobulin heavy chain variable region that specifically binds to CD3; Fc is a region comprising an immunoglobulin heavy chain constant region 2 (CH2), an immunoglobulin heavy chain constant region 3 (CH3), and optionally, an immunoglobulin hinge; CH1 is an immunoglobulin heavy chain constant region 1; CL is an immunoglobulin light chain constant region; and L1-L88 are amino acid linkers. In some aspects, the first polypeptide has a structure represented by VL1-L1-VL2-L2-VH2-L3-VH1-L4-CH1-L5-Fc; VL1-L1-VH2-L2-VL2-L3-VH1-L4-CH1-L5-Fc; VH1-L6-VH2-L7-VL2-L8-VL1-L9-CH1-L10-Fc; VH1-L6-VL2-L7-VH2-L8-VL1-L9-CH1-L10-Fc; VL1-L11-VL2-L12-VH2-L13-VH1-L14-CL-L15-Fc; VL1-L11-VH2-L12-VL2-L13-VH1-L14-CL-L15-Fc; VH1-L16-VH2-L17-VL2-L18-VL1-L19-CL-L20-Fc; VH1-L16-VL2-L17-VH2-L18-VL1-L19-CL-L20-Fc; VL1-L21-VL2-L22-VH2-L23-VH1-L24-CH1-L25-CL-L26-Fc; VL1-L21-VH2-L22-VL2-L23-VH1-L24-CH1-L25-CL-L26-Fc; VH1-L27-VH2-L28-VL2-L29-VL1-L30-CH1-L31-CL-L32-Fc; VH1-L27-VL2-L28-VH2-L29-VL1-L30-CH1-L31-CL-L32-Fc; VL1-L33-VL2-L34-VH2-L35-VH1-L36-CL-L37-CH1-L38-Fc; VL1-L33-VH2-L34-VL2-L35-VH1-L36-CL-L37-CH1-L38-Fc; VH1-L39-VH2-L40-VL2-L41-VL1-L42-CL-L43-CH1-L44-Fc; or VH1-L39-VL2-L40-VH2-L41-VL1-L42-CL-L43-CH1-L44-Fc; and the second polypeptide has a structure represented by VL3-L45-VL4-L46-VH4-L47-VH3-L48-CH1-L49-Fc. In some aspects, the first polypeptide has a structure represented by VL1-L1-VL2-L2-VH2-L3-VH1-L4-CH1-L5-Fc; VL1-L1-VH2-L2-VL2-L3-VH1-L4-CH1-L5-Fc; VH1-L6-VH2-L7-VL2-L8-VL1-L9-CH1-L10-Fc; VH1-L6-VL2-L7-VH2-L8-VL1-L9-CH1-L10-Fc; VL1-L11-VL2-L12-VH2-L13-VH1-L14-CL-L15-Fc; VL1-L11-VH2-L12-VL2-L13-VH1-L14-CL-L15-Fc; VH1-L16-VH2-L17-VL2-L18-VL1-L19-CL-L20-Fc; VH1-L16-VL2-L17-VH2-L18-VL1-L19-CL-L20-Fc; VL1-L21-VL2-L22-VH2-L23-VH1-L24-CH1-L25-CL-L26-Fc; VL1-L21-VH2-L22-VL2-L23-VH1-L24-CH1-L25-CL-L26-Fc; VH1-L27-VH2-L28-VL2-L29-VL1-L30-CH1-L31-CL-L32-Fc; VH1-L27-VL2-L28-VH2-L29-VL1-L30-CH1-L31-CL-L32-Fc; VL1-L33-VL2-L34-VH2-L35-VH1-L36-CL-L37-CH1-L38-Fc; VL1-L33-VH2-L34-VL2-L35-VH1-L36-CL-L37-CH1-L38-Fc; VH1-L39-VH2-L40-VL2-L41-VL1-L42-CL-L43-CH1-L44-Fc; or VH1-L39-VL2-L40-VH2-L41-VL1-L42-CL-L43-CH1-L44-Fc; and the second polypeptide has a structure represented by VL3-L45-VH4-L46-VL4-L47-VH3-L48-CH1-L49-Fc. In some aspects, the first polypeptide has a structure represented by VL1-L1-VL2-L2-VH2-L3-VH1-L4-CH1-L5-Fc; VL1-L1-VH2-L2-VL2-L3-VH1-L4-CH1-L5-Fc; VH1-L6-VH2-L7-VL2-L8-VL1-L9-CH1-L10-Fc; VH1-L6-VL2-L7-VH2-L8-VL1-L9-CH1-L10-Fc; VL1-L11-VL2-L12-VH2-L13-VH1-L14-CL-L15-Fc; VL1-L11-VH2-L12-VL2-L13-VH1-L14-CL-L15-Fc; VH1-L16-VH2-L17-VL2-L18-VL1-L19-CL-L20-Fc; VH1-L16-VL2-L17-VH2-L18-VL1-L19-CL-L20-Fc; VL1-L21-VL2-L22-VH2-L23-VH1-L24-CH1-L25-CL-L26-Fc; VL1-L21-VH2-L22-VL2-L23-VH1-L24-CH1-L25-CL-L26-Fc; VH1-L27-VH2-L28-VL2-L29-VL1-L30-CH1-L31-CL-L32-Fc; VH1-L27-VL2-L28-VH2-L29-VL1-L30-CH1-L31-CL-L32-Fc; VL1-L33-VL2-L34-VH2-L35-VH1-L36-CL-L37-CH1-L38-Fc; VL1-L33-VH2-L34-VL2-L35-VH1-L36-CL-L37-CH1-L38-Fc; VH1-L39-VH2-L40-VL2-L41-VL1-L42-CL-L43-CH1-L44-Fc; or VH1-L39-VL2-L40-VH2-L41-VL1-L42-CL-L43-CH1-L44-Fc; and the second polypeptide has a structure represented by VH3-L50-VH4-L51-VL4-L52-VL3-L53-CH1-L54-Fc. In some aspects, the first polypeptide has a structure represented by VL1-L1-VL2-L2-VH2-L3-VH1-L4-CH1-L5-Fc; VL1-L1-VH2-L2-VL2-L3-VH1-L4-CH1-L5-Fc; VH1-L6-VH2-L7-VL2-L8-VL1-L9-CH1-L10-Fc; VH1-L6-VL2-L7-VH2-L8-VL1-L9-CH1-L10-Fc; VL1-L11-VL2-L12-VH2-L13-VH1-L14-CL-L15-Fc; VL1-L11-VH2-L12-VL2-L13-VH1-L14-CL-L15-Fc; VH1-L16-VH2-L17-VL2-L18-VL1-L19-CL-L20-Fc; VH1-L16-VL2-L17-VH2-L18-VL1-L19-CL-L20-Fc; VL1-L21-VL2-L22-VH2-L23-VH1-L24-CH1-L25-CL-L26-Fc; VL1-L21-VH2-L22-VL2-L23-VH1-L24-CH1-L25-CL-L26-Fc; VH1-L27-VH2-L28-VL2-L29-VL1-L30-CH1-L31-CL-L32-Fc; VH1-L27-VL2-L28-VH2-L29-VL1-L30-CH1-L31-CL-L32-Fc; VL1-L33-VL2-L34-VH2-L35-VH1-L36-CL-L37-CH1-L38-Fc; VL1-L33-VH2-L34-VL2-L35-VH1-L36-CL-L37-CH1-L38-Fc; VH1-L39-VH2-L40-VL2-L41-VL1-L42-CL-L43-CH1-L44-Fc; or VH1-L39-VL2-L40-VH2-L41-VL1-L42-CL-L43-CH1-L44-Fc; and the second polypeptide has a structure represented by VH3-L50-VL4-L51-VH4-L52-VL3-L53-CH1-L54-Fc. In some aspects, the first polypeptide has a structure represented by VL1-L1-VL2-L2-VH2-L3-VH1-L4-CH1-L5-Fc; VL1-L1-VH2-L2-VL2-L3-VH1-L4-CH1-L5-Fc; VH1-L6-VH2-L7-VL2-L8-VL1-L9-CH1-L10-Fc; VH1-L6-VL2-L7-VH2-L8-VL1-L9-CH1-L10-Fc; VL1-L11-VL2-L12-VH2-L13-VH1-L14-CL-L15-Fc; VL1-L11-VH2-L12-VL2-L13-VH1-L14-CL-L15-Fc; VH1-L16-VH2-L17-VL2-L18-VL1-L19-CL-L20-Fc; VH1-L16-VL2-L17-VH2-L18-VL1-L19-CL-L20-Fc; VL1-L21-VL2-L22-VH2-L23-VH1-L24-CH1-L25-CL-L26-Fc; VL1-L21-VH2-L22-VL2-L23-VH1-L24-CH1-L25-CL-L26-Fc; VH1-L27-VH2-L28-VL2-L29-VL1-L30-CH1-L31-CL-L32-Fc; VH1-L27-VL2-L28-VH2-L29-VL1-L30-CH1-L31-CL-L32-Fc; VL1-L33-VL2-L34-VH2-L35-VH1-L36-CL-L37-CH1-L38-Fc; VL1-L33-VH2-L34-VL2-L35-VH1-L36-CL-L37-CH1-L38-Fc; VH1-L39-VH2-L40-VL2-L41-VL1-L42-CL-L43-CH1-L44-Fc; or VH1-L39-VL2-L40-VH2-L41-VL1-L42-CL-L43-CH1-L44-Fc; and the second polypeptide has a structure represented by VL3-L55-VL4-L56-VH4-L57-VH3-L58-CL-L59-Fc. In some aspects, the first polypeptide has a structure represented by VL1-L1-VL2-L2-VH2-L3-VH1-L4-CH1-L5-Fc; VL1-L1-VH2-L2-VL2-L3-VH1-L4-CH1-L5-Fc; VH1-L6-VH2-L7-VL2-L8-VL1-L9-CH1-L10-Fc; VH1-L6-VL2-L7-VH2-L8-VL1-L9-CH1-L10-Fc; VL1-L11-VL2-L12-VH2-L13-VH1-L14-CL-L15-Fc; VL1-L11-VH2-L12-VL2-L13-VH1-L14-CL-L15-Fc; VH1-L16-VH2-L17-VL2-L18-VL1-L19-CL-L20-Fc; VH1-L16-VL2-L17-VH2-L18-VL1-L19-CL-L20-Fc; VL1-L21-VL2-L22-VH2-L23-VH1-L24-CH1-L25-CL-L26-Fc; VL1-L21-VH2-L22-VL2-L23-VH1-L24-CH1-L25-CL-L26-Fc; VH1-L27-VH2-L28-VL2-L29-VL1-L30-CH1-L31-CL-L32-Fc; VH1-L27-VL2-L28-VH2-L29-VL1-L30-CH1-L31-CL-L32-Fc; VL1-L33-VL2-L34-VH2-L35-VH1-L36-CL-L37-CH1-L38-Fc; VL1-L33-VH2-L34-VL2-L35-VH1-L36-CL-L37-CH1-L38-Fc; VH1-L39-VH2-L40-VL2-L41-VL1-L42-CL-L43-CH1-L44-Fc; or VH1-L39-VL2-L40-VH2-L41-VL1-L42-CL-L43-CH1-L44-Fc; and the second polypeptide has a structure represented by VL3-L55-VH4-L56-VL4-L57-VH3-L58-CL-L59-Fc. In some aspects, the first polypeptide has a structure represented by VL1-L1-VL2-L2-VH2-L3-VH1-L4-CH1-L5-Fc; VL1-L1-VH2-L2-VL2-L3-VH1-L4-CH1-L5-Fc; VH1-L6-VH2-L7-VL2-L8-VL1-L9-CH1-L10-Fc; VH1-L6-VL2-L7-VH2-L8-VL1-L9-CH1-L10-Fc; VL1-L11-VL2-L12-VH2-L13-VH1-L14-CL-L15-Fc; VL1-L11-VH2-L12-VL2-L13-VH1-L14-CL-L15-Fc; VH1-L16-VH2-L17-VL2-L18-VL1-L19-CL-L20-Fc; VH1-L16-VL2-L17-VH2-L18-VL1-L19-CL-L20-Fc; VL1-L21-VL2-L22-VH2-L23-VH1-L24-CH1-L25-CL-L26-Fc; VL1-L21-VH2-L22-VL2-L23-VH1-L24-CH1-L25-CL-L26-Fc; VH1-L27-VH2-L28-VL2-L29-VL1-L30-CH1-L31-CL-L32-Fc; VH1-L27-VL2-L28-VH2-L29-VL1-L30-CH1-L31-CL-L32-Fc; VL1-L33-VL2-L34-VH2-L35-VH1-L36-CL-L37-CH1-L38-Fc; VL1-L33-VH2-L34-VL2-L35-VH1-L36-CL-L37-CH1-L38-Fc; VH1-L39-VH2-L40-VL2-L41-VL1-L42-CL-L43-CH1-L44-Fc; or VH1-L39-VL2-L40-VH2-L41-VL1-L42-CL-L43-CH1-L44-Fc; and the second polypeptide has a structure represented by VH3-L60-VH4-L61-VL4-L62-VL3-L63-CL-L64-Fc. In some aspects, the first polypeptide has a structure represented by VL1-L1-VL2-L2-VH2-L3-VH1-L4-CH1-L5-Fc; VL1-L1-VH2-L2-VL2-L3-VH1-L4-CH1-L5-Fc; VH1-L6-VH2-L7-VL2-L8-VL1-L9-CH1-L10-Fc; VH1-L6-VL2-L7-VH2-L8-VL1-L9-CH1-L10-Fc; VL1-L11-VL2-L12-VH2-L13-VH1-L14-CL-L15-Fc; VL1-L11-VH2-L12-VL2-L13-VH1-L14-CL-L15-Fc; VH1-L16-VH2-L17-VL2-L18-VL1-L19-CL-L20-Fc; VH1-L16-VL2-L17-VH2-L18-VL1-L19-CL-L20-Fc; VL1-L21-VL2-L22-VH2-L23-VH1-L24-CH1-L25-CL-L26-Fc; VL1-L21-VH2-L22-VL2-L23-VH1-L24-CH1-L25-CL-L26-Fc; VH1-L27-VH2-L28-VL2-L29-VL1-L30-CH1-L31-CL-L32-Fc; VH1-L27-VL2-L28-VH2-L29-VL1-L30-CH1-L31-CL-L32-Fc; VL1-L33-VL2-L34-VH2-L35-VH1-L36-CL-L37-CH1-L38-Fc; VL1-L33-VH2-L34-VL2-L35-VH1-L36-CL-L37-CH1-L38-Fc; VH1-L39-VH2-L40-VL2-L41-VL1-L42-CL-L43-CH1-L44-Fc; or VH1-L39-VL2-L40-VH2-L41-VL1-L42-CL-L43-CH1-L44-Fc; and the second polypeptide has a structure represented by VH3-L60-VL4-L61-VH4-L62-VL3-L63-CL-L64-Fc. In some aspects, the first polypeptide has a structure represented by VL1-L1-VL2-L2-VH2-L3-VH1-L4-CH1-L5-Fc; VL1-L1-VH2-L2-VL2-L3-VH1-L4-CH1-L5-Fc; VH1-L6-VH2-L7-VL2-L8-VL1-L9-CH1-L10-Fc; VH1-L6-VL2-L7-VH2-L8-VL1-L9-CH1-L10-Fc; VL1-L11-VL2-L12-VH2-L13-VH1-L14-CL-L15-Fc; VL1-L11-VH2-L12-VL2-L13-VH1-L14-CL-L15-Fc; VH1-L16-VH2-L17-VL2-L18-VL1-L19-CL-L20-Fc; VH1-L16-VL2-L17-VH2-L18-VL1-L19-CL-L20-Fc; VL1-L21-VL2-L22-VH2-L23-VH1-L24-CH1-L25-CL-L26-Fc; VL1-L21-VH2-L22-VL2-L23-VH1-L24-CH1-L25-CL-L26-Fc; VH1-L27-VH2-L28-VL2-L29-VL1-L30-CH1-L31-CL-L32-Fc; VH1-L27-VL2-L28-VH2-L29-VL1-L30-CH1-L31-CL-L32-Fc; VL1-L33-VL2-L34-VH2-L35-VH1-L36-CL-L37-CH1-L38-Fc; VL1-L33-VH2-L34-VL2-L35-VH1-L36-CL-L37-CH1-L38-Fc; VH1-L39-VH2-L40-VL2-L41-VL1-L42-CL-L43-CH1-L44-Fc; or VH1-L39-VL2-L40-VH2-L41-VL1-L42-CL-L43-CH1-L44-Fc; and the second polypeptide has a structure represented by VL3-L65-VL4-L66-VH4-L67-VH3-L68-CH1-L69-CL-L70-Fc. In some aspects, the first polypeptide has a structure represented by VL1-L1-VL2-L2-VH2-L3-VH1-L4-CH1-L5-Fc; VL1-L1-VH2-L2-VL2-L3-VH1-L4-CH1-L5-Fc; VH1-L6-VH2-L7-VL2-L8-VL1-L9-CH1-L10-Fc; VH1-L6-VL2-L7-VH2-L8-VL1-L9-CH1-L10-Fc; VL1-L11-VL2-L12-VH2-L13-VH1-L14-CL-L15-Fc; VL1-L11-VH2-L12-VL2-L13-VH1-L14-CL-L15-Fc; VH1-L16-VH2-L17-VL2-L18-VL1-L19-CL-L20-Fc; VH1-L16-VL2-L17-VH2-L18-VL1-L19-CL-L20-Fc; VL1-L21-VL2-L22-VH2-L23-VH1-L24-CH1-L25-CL-L26-Fc; VL1-L21-VH2-L22-VL2-L23-VH1-L24-CH1-L25-CL-L26-Fc; VH1-L27-VH2-L28-VL2-L29-VL1-L30-CH1-L31-CL-L32-Fc; VH1-L27-VL2-L28-VH2-L29-VL1-L30-CH1-L31-CL-L32-Fc; VL1-L33-VL2-L34-VH2-L35-VH1-L36-CL-L37-CH1-L38-Fc; VL1-L33-VH2-L34-VL2-L35-VH1-L36-CL-L37-CH1-L38-Fc; VH1-L39-VH2-L40-VL2-L41-VL1-L42-CL-L43-CH1-L44-Fc; or VH1-L39-VL2-L40-VH2-L41-VL1-L42-CL-L43-CH1-L44-Fc; and the second polypeptide has a structure represented by VL3-L65-VH4-L66-VL4-L67-VH3-L68-CH1-L69-CL-L70-Fc. In some aspects, the first polypeptide has a structure represented by VL1-L1-VL2-L2-VH2-L3-VH1-L4-CH1-L5-Fc; VL1-L1-VH2-L2-VL2-L3-VH1-L4-CH1-L5-Fc; VH1-L6-VH2-L7-VL2-L8-VL1-L9-CH1-L10-Fc; VH1-L6-VL2-L7-VH2-L8-VL1-L9-CH1-L10-Fc; VL1-L11-VL2-L12-VH2-L13-VH1-L14-CL-L15-Fc; VL1-L11-VH2-L12-VL2-L13-VH1-L14-CL-L15-Fc; VH1-L16-VH2-L17-VL2-L18-VL1-L19-CL-L20-Fc; VH1-L16-VL2-L17-VH2-L18-VL1-L19-CL-L20-Fc; VL1-L21-VL2-L22-VH2-L23-VH1-L24-CH1-L25-CL-L26-Fc; VL1-L21-VH2-L22-VL2-L23-VH1-L24-CH1-L25-CL-L26-Fc; VH1-L27-VH2-L28-VL2-L29-VL1-L30-CH1-L31-CL-L32-Fc; VH1-L27-VL2-L28-VH2-L29-VL1-L30-CH1-L31-CL-L32-Fc; VL1-L33-VL2-L34-VH2-L35-VH1-L36-CL-L37-CH1-L38-Fc; VL1-L33-VH2-L34-VL2-L35-VH1-L36-CL-L37-CH1-L38-Fc; VH1-L39-VH2-L40-VL2-L41-VL1-L42-CL-L43-CH1-L44-Fc; or VH1-L39-VL2-L40-VH2-L41-L1-L42-CL-L43-CH1-L44-Fc; and the second polypeptide has a structure represented by VH3-L71-VH4-L72-VL4-L73-VL3-L74-CH1-L75-CL-L76-Fc. In some aspects, the first polypeptide has a structure represented by VL1-L1-VL2-L2-VH2-L3-VH1-L4-CH1-L5-Fc; VL1-L1-VH2-L2-VL2-L3-VH1-L4-CH1-L5-Fc; VH1-L6-VH2-L7-VL2-L8-VL1-L9-CH1-L10-Fc; VH1-L6-VL2-L7-VH2-L8-VL1-L9-CH1-L10-Fc; VL1-L11-VL2-L12-VH2-L13-VH1-L14-CL-L15-Fc; VL1-L11-VH2-L12-VL2-L13-VH1-L14-CL-L15-Fc; VH1-L16-VH2-L17-VL2-L18-VL1-L19-CL-L20-Fc; VH1-L16-VL2-L17-VH2-L18-VL1-L19-CL-L20-Fc; VL1-L21-VL2-L22-VH2-L23-VH1-L24-CH1-L25-CL-L26-Fc; VL1-L21-VH2-L22-VL2-L23-VH1-L24-CH1-L25-CL-L26-Fc; VH1-L27-VH2-L28-VL2-L29-VL1-L30-CH1-L31-CL-L32-Fc; VH1-L27-VL2-L28-VH2-L29-VL1-L30-CH1-L31-CL-L32-Fc; VL1-L33-VL2-L34-VH2-L35-VH1-L36-CL-L37-CH1-L38-Fc; VL1-L33-VH2-L34-VL2-L35-VH1-L36-CL-L37-CH1-L38-Fc; VH1-L39-VH2-L40-VL2-L41-VL1-L42-CL-L43-CH1-L44-Fc; or VH1-L39-VL2-L40-VH2-L41-VL1-L42-CL-L43-CH1-L44-Fc; and the second polypeptide has a structure represented by VH3-L71-VL4-L72-VH4-L73-VL3-L74-CH1-L75-CL-L76-Fc. In some aspects, the first polypeptide has a structure represented by VL1-L1-VL2-L2-VH2-L3-VH1-L4-CH1-L5-Fc; VL1-L1-VH2-L2-VL2-L3-VH1-L4-CH1-L5-Fc; VH1-L6-VH2-L7-VL2-L8-VL1-L9-CH1-L10-Fc; VH1-L6-VL2-L7-VH2-L8-VL1-L9-CH1-L10-Fc; VL1-L11-VL2-L12-VH2-L13-VH1-L14-CL-L15-Fc; VL1-L11-VH2-L12-VL2-L13-VH1-L14-CL-L15-Fc; VH1-L16-VH2-L17-VL2-L18-VL1-L19-CL-L20-Fc; VH1-L16-VL2-L17-VH2-L18-VL1-L19-CL-L20-Fc; VL1-L21-VL2-L22-VH2-L23-VH1-L24-CH1-L25-CL-L26-Fc; VL1-L21-VH2-L22-VL2-L23-VH1-L24-CH1-L25-CL-L26-Fc; VH1-L27-VH2-L28-VL2-L29-VL1-L30-CH1-L31-CL-L32-Fc; VH1-L27-VL2-L28-VH2-L29-VL1-L30-CH1-L31-CL-L32-Fc; VL1-L33-VL2-L34-VH2-L35-VH1-L36-CL-L37-CH1-L38-Fc; VL1-L33-VH2-L34-VL2-L35-VH1-L36-CL-L37-CH1-L38-Fc; VH1-L39-VH2-L40-VL2-L41-VL1-L42-CL-L43-CH1-L44-Fc; or VH1-L39-VL2-L40-VH2-L41-VL1-L42-CL-L43-CH1-L44-Fc; and the second polypeptide has a structure represented by VL3-L77-VL4-L78-VH4-L79-VH3-L80-CL-L81-CH1-L82-Fc. In some aspects, the first polypeptide has a structure represented by VL1-L1-VL2-L2-VH2-L3-VH1-L4-CH1-L5-Fc; VL1-L1-VH2-L2-VL2-L3-VH1-L4-CH1-L5-Fc; VH1-L6-VH2-L7-VL2-L8-VL1-L9-CH1-L10-Fc; VH1-L6-VL2-L7-VH2-L8-VL1-L9-CH1-L10-Fc; VL1-L11-VL2-L12-VH2-L13-VH1-L14-CL-L15-Fc; VL1-L11-VH2-L12-VL2-L13-VH1-L14-CL-L15-Fc; VH1-L16-VH2-L17-VL2-L18-VL1-L19-CL-L20-Fc; VH1-L16-VL2-L17-VH2-L18-VL1-L19-CL-L20-Fc; VL1-L21-VL2-L22-VH2-L23-VH1-L24-CH1-L25-CL-L26-Fc; VL1-L21-VH2-L22-VL2-L23-VH1-L24-CH1-L25-CL-L26-Fc; VH1-L27-VH2-L28-VL2-L29-VL1-L30-CH1-L31-CL-L32-Fc; VH1-L27-VL2-L28-VH2-L29-VL1-L30-CH1-L31-CL-L32-Fc; VL1-L33-VL2-L34-VH2-L35-VH1-L36-CL-L37-CH1-L38-Fc; VL1-L33-VH2-L34-VL2-L35-VH1-L36-CL-L37-CH1-L38-Fc; VH1-L39-VH2-L40-VL2-L41-VL1-L42-CL-L43-CH1-L44-Fc; or VH1-L39-VL2-L40-VH2-L41-VL1-L42-CL-L43-CH1-L44-Fc; and the second polypeptide has a structure represented by VL3-L77-VH4-L78-VL4-L79-VH3-L80-CL-L81-CH1-L82-Fc. In some aspects, the first polypeptide has a structure represented by VL1-L1-VL2-L2-VH2-L3-VH1-L4-CH1-L5-Fc; VL1-L1-VH2-L2-VL2-L3-VH1-L4-CH1-L5-Fc; VH1-L6-VH2-L7-VL2-L8-VL1-L9-CH1-L10-Fc; VH1-L6-VL2-L7-VH2-L8-VL1-L9-CH1-L10-Fc; VL1-L11-VL2-L12-VH2-L13-VH1-L14-CL-L15-Fc; VL1-L11-VH2-L12-VL2-L13-VH1-L14-CL-L15-Fc; VH1-L16-VH2-L17-VL2-L18-VL1-L19-CL-L20-Fc; VH1-L16-VL2-L17-VH2-L18-VL1-L19-CL-L20-Fc; VL1-L21-VL2-L22-VH2-L23-VH1-L24-CH1-L25-CL-L26-Fc; VL1-L21-VH2-L22-VL2-L23-VH1-L24-CH1-L25-CL-L26-Fc; VH1-L27-VH2-L28-VL2-L29-VL1-L30-CH1-L31-CL-L32-Fc; VH1-L27-VL2-L28-VH2-L29-VL1-L30-CH1-L31-CL-L32-Fc; VL1-L33-VL2-L34-VH2-L35-VH1-L36-CL-L37-CH1-L38-Fc; VL1-L33-VH2-L34-VL2-L35-VH1-L36-CL-L37-CH1-L38-Fc; VH1-L39-VH2-L40-VL2-L41-VL1-L42-CL-L43-CH1-L44-Fc; or VH1-L39-VL2-L40-VH2-L41-VL1-L42-CL-L43-CH1-L44-Fc; and the second polypeptide has a structure represented by VH3-L83-VH4-L84-VL4-L85-VL3-L86-CL-L87-CH1-L88-Fc. In some aspects, the first polypeptide has a structure represented by VL1-L1-VL2-L2-VH2-L3-VH1-L4-CH1-L5-Fc; VL1-L1-VH2-L2-VL2-L3-VH1-L4-CH1-L5-Fc; VH1-L6-VH2-L7-VL2-L8-VL1-L9-CH1-L10-Fc; VH1-L6-VL2-L7-VH2-L8-VL1-L9-CH1-L10-Fc; VL1-L11-VL2-L12-VH2-L13-VH1-L14-CL-L15-Fc; VL1-L11-VH2-L12-VL2-L13-VH1-L14-CL-L15-Fc; VH1-L16-VH2-L17-VL2-L18-VL1-L19-CL-L20-Fc; VH1-L16-VL2-L17-VH2-L18-VL1-L19-CL-L20-Fc; VL1-L21-VL2-L22-VH2-L23-VH1-L24-CH1-L25-CL-L26-Fc; VL1-L21-VH2-L22-VL2-L23-VH1-L24-CH1-L25-CL-L26-Fc; VH1-L27-VH2-L28-VL2-L29-VL1-L30-CH1-L31-CL-L32-Fc; VH1-L27-VL2-L28-VH2-L29-VL1-L30-CH1-L31-CL-L32-Fe; VL1-L33-VL2-L34-VH2-L35-VH1-L36-CL-L37-CH1-L38-Fc; VL1-L33-VH2-L34-VL2-L35-VH1-L36-CL-L37-CH1-L38-Fc; VH1-L39-VH2-L40-VL2-L41-VL1-L42-CL-L43-CH1-L44-Fc; or VH1-L39-VL2-L40-VH2-L41-VL1-L42-CL-L43-CH1-L44-Fc; and the second polypeptide has a structure represented by VH3-L83-VL4-L84-VH4-L85-VL3-L86-CL-L87-CH1-L88-Fc. In some aspects, the first polypeptide has a structure represented by: VL1-L1-VL2-L2-VH2-L3-VH1-L4-CH1-L5-Fc; VH1-L6-VH2-L7-VL2-L8-VL1-L9-CH1-L10-Fc; VL1-L11-VL2-L12-VH2-L13-VH1-L14-CL-L15-Fc; VH1-L16-VH2-L17-VL2-L18-VL1-L19-CL-L20-Fc; VL1-L21-VL2-L22-VH2-L23-VH1-L24-CH1-L25-CL-L26-Fc; VH1-L27-VH2-L28-VL2-L29-VL1-L30-CH1-L31-CL-L32-Fc; VL1-L33-VL2-L34-VH2-L35-VH1-L36-CL-L37-CH1-L38-Fc; or VH1-L39-VH2-L40-VL2-L41-VL1-L42-CL-L43-CH1-L44-Fc; and the second polypeptide has a structure represented by: VL3-L45-VL4-L46-VH4-L47-VH3-L48-CH1-L49-Fc; VH3-L50-VH4-L51-VL4-L52-VL3-L53-CH1-L54-Fc; VL3-L55-VL4-L56-VH4-L57-VH3-L58-CL-L59-Fc; VH3-L60-VH4-L61-VL4-L62-VL3-L63-CL-L64-Fc; VL3-L65-VL4-L66-VH4-L67-VH3-L68-CH1-L69-CL-L70-Fc; VH3-L71-VH4-L72-VL4-L73-VL3-L74-CH1-L75-CL-L76-Fc; VL3-L77-VL4-L78-VH4-L79-VH3-L80-CL-L81-CH1-L82-Fc; or VH3-L83-VH4-L84-VL4-L85-VL3-L86-CL-L87-CH1-L88-Fc.

[0139] Any one of the first polypeptides described herein may be combined with any one of the second, third and/or fourth polypeptides described herein to form an antigen binding polypeptide complex of the invention.

[0140] All the disclosures relating to the antigen binding polypeptide complex structures described herein apply to and can be combined with all the VH and VL regions described herein including all the target antigens described herein and all the VH and VL sequences and CDR sequences described herein.

[0141] In some aspects, the antigen binding polypeptide complex (e.g., antibody or antigen binding fragment thereof) specifically binds to a tumor-associated antigen (TAA). In some aspects, the antigen binding polypeptide complex specifically binds at least one epitope on a TAA. In some aspects, a light chain variable region (VL) and a corresponding heavy chain variable region (VH) of the antigen binding polypeptide complex specifically bind to a TAA. In some aspects, the TAA is A2AR, APRIL, ATPDase, BAFF, BAFFR, BCMA, BlyS, BTK, BTLA, B7DC, B7H1, B7H2, B7H3, B7H4, B7H5, B7H6, B7H7, B7RP1, B7-4, C3, C5, CCL2, CCL3, CCL4, CCL5, CCL7, CCL8, CCL11, CCL15, CCL17, CCL19, CCL20, CCL21, CCL25, CCR3, CCR4, CD16A, CD19, CD20, CD24, CD27, CD28, CD30, CD38, CD39, CD40, CD40L, CD47, CD52, CD70, CD80, CD86, CD123, CD133, CD137, CD137L, CD160, CD272, CEACAM5, CLEC9, CLEC91, CRTH2, CSF-1, CSF-2, CSF-3, CXCL1, CXCL2, CXCL4, CXCL12, CXCL13, CXCR3, cMet, CTLA4, DLL3, DLL4, DNGR-1, E-cadherin, EGFR, ENTPD1, EpCAM, FCER1, FCER1A, FCER2, FGFR, FLAP, FOLH1, Gi24, GITR, GITRL, GPR5, GP100, GPRC5D, HER2, HER3, ICOSL, ICOS, HHLA2, HMGB1, HVEM, IDO, IFNa, IgE, IGF1R, IL2Rbeta, IL1, ILIA, IL1B, IL1F10, IL2, IL4, IL4Ra, IL5, IL5R, IL6, IL7, IL7Ra, IL8, IL9, IL9R, IL10, rhILlO, IL12, IL13, IL13Ra1, IL13Ra2, IL15, IL17, IL17Rb, IL18, IL22, IL23, IL25, IL7, IL33, IL35, ITGB4, ITK, KIR, LAG3, LAMP1, leptin, LPFS2, MHC class II, MUC-1, MUC-16, NCR3LG1, NKG2D, NKp46, NTPDase-1, OX40, OX40L, PD-1, PD-L1, PD-L2, PROM1, S152, SIRPalpha, SISP1, SLC, SPG64, ST2, STEAP1, STEAP2, Syk kinase, STEAP1, TROP2, TACI, TDO, TGFBETA, T14, TIGIT, TIM3, TLR, TLR2, TLR4, TLR5, TLR9, TMEF1, TNFa, TNFRSF7, Tp55, TREM1, TSLP, TSLPR, TWEAK, VEGF, VISTA, Vstm3, or WUCAM, or combinations thereof. In some aspects, the antigen binding polypeptide complex comprises a VL1 that specifically binds to A2AR, APRIL, ATPDase, BAFF, BAFFR, BCMA, BlyS, BTK, BTLA, B7DC, B7H1, B7H2, B7H3, B7H4, B7H5, B7H6, B7H7, B7RP1, B7-4, C3, C5, CCL2, CCL3, CCL4, CCL5, CCL7, CCL8, CCL11, CCL15, CCL17, CCL19, CCL20, CCL21, CCL25, CCR3, CCR4, CD16A, CD19, CD20, CD24, CD27, CD28, CD30, CD38, CD39, CD40, CD40L, CD47, CD52, CD70, CD80, CD86, CD123, CD133, CD137, CD137L, CD160, CD272, CEACAM5, CLEC9, CLEC91, CRTH2, CSF-1, CSF-2, CSF-3, CXCL1, CXCL2, CXCL4, CXCL12, CXCL13, CXCR3, cMet, CTLA4, DLL3, DLL4, DNGR-1, E-cadherin, EGFR, ENTPD1, EpCAM, FCER1, FCER1A, FCER2, FGFR, FLAP, FOLH1, Gi24, GITR, GITRL, GPR5, GP100, GPRC5D, HER2, HER3, ICOSL, ICOS, HHLA2, HMGB1, HVEM, IDO, IFNa, IgE, IGF1R, IL2Rbeta, IL1, ILIA, IL1B, IL1F10, IL2, IL4, IL4Ra, IL5, IL5R, IL6, IL7, IL7Ra, IL8, IL9, IL9R, IL10, rhILlO, IL12, IL13, IL13Ra1, IL13Ra2, IL15, IL17, IL17Rb, IL18, IL22, IL23, IL25, IL7, IL33, IL35, ITGB4, ITK, KIR, LAG3, LAMP1, leptin, LPFS2, MHC class II, MUC-1, MUC-16, NCR3LG1, NKG2D, NKp46, NTPDase-1, OX40, OX40L, PD-1, PD-L1, PD-L2, PROM1, S152, SIRPalpha, SISP1, SLC, SPG64, ST2, STEAP1, STEAP2, Syk kinase, STEAP1, TROP2, TACI, TDO, TGFBETA, T14, TIGIT, TIM3, TLR, TLR2, TLR4, TLR5, TLR9, TMEF1, TNFa, TNFRSF7, Tp55, TREM1, TSLP, TSLPR, TWEAK, VEGF, VISTA, Vstm3, or WUCAM, or combinations thereof. For example, the VL1 may specifically bind to CD3. For example, the VL1 may specifically bind to Trop2. For example, the VL1 may specifically bind to cMet. For example, the VL1 may specifically bind to CD19. For example, the VL1 may specifically bind to CD20. In some aspects, the antigen binding polypeptide complex comprises a VL2 that specifically binds to A2AR, APRIL, ATPDase, BAFF, BAFFR, BCMA, BlyS, BTK, BTLA, B7DC, B7H1, B7H2, B7H3, B7H4, B7H5, B7H6, B7H7, B7RP1, B7-4, C3, C5, CCL2, CCL3, CCL4, CCL5, CCL7, CCL8, CCL11, CCL15, CCL17, CCL19, CCL20, CCL21, CCL25, CCR3, CCR4, CD16A, CD19, CD20, CD24, CD27, CD28, CD30, CD38, CD39, CD40, CD40L, CD47, CD52, CD70, CD80, CD86, CD123, CD133, CD137, CD137L, CD160, CD272, CEACAM5, CLEC9, CLEC91, CRTH2, CSF-1, CSF-2, CSF-3, CXCL1, CXCL2, CXCL4, CXCL12, CXCL13, CXCR3, cMet, CTLA4, DLL3, DLL4, DNGR-1, E-cadherin, EGFR, ENTPD1, EpCAM, FCER1, FCER1A, FCER2, FGFR, FLAP, FOLH1, Gi24, GITR, GITRL, GPR5, GP100, GPRC5D, HER2, HER3, ICOSL, ICOS, HHLA2, HMGB1, HVEM, IDO, IFNa, IgE, IGF1R, IL2Rbeta, IL1, ILIA, IL1B, IL1F10, IL2, IL4, IL4Ra, IL5, IL5R, IL6, IL7, IL7Ra, IL8, IL9, IL9R, IL10, rhILlO, IL12, IL13, IL13Ra1, IL13Ra2, IL15, IL17, IL17Rb, IL18, IL22, IL23, IL25, IL7, IL33, IL35, ITGB4, ITK, KIR, LAG3, LAMP1, leptin, LPFS2, MHC class II, MUC-1, MUC-16, NCR3LG1, NKG2D, NKp46, NTPDase-1, OX40, OX40L, PD-1, PD-L1, PD-L2, PROM1, S152, SIRPalpha, SISP1, SLC, SPG64, ST2, STEAP1, STEAP2, Syk kinase, STEAP1, TROP2, TACI, TDO, TGFBETA, T14, TIGIT, TIM3, TLR, TLR2, TLR4, TLR5, TLR9, TMEF1, TNFa, TNFRSF7, Tp55, TREM1, TSLP, TSLPR, TWEAK, VEGF, VISTA, Vstm3, or WUCAM, or combinations thereof. For example, the VL2 may specifically bind to CD3. For example, the VL2 may specifically bind to Trop2. For example, the VL2 may specifically bind to cMet. For example, the VL2 may specifically bind to CD19. For example, the VL2 may specifically bind to CD20. In some aspects, the antigen binding polypeptide complex comprises a VL3 that specifically binds to A2AR, APRIL, ATPDase, BAFF, BAFFR, BCMA, BlyS, BTK, BTLA, B7DC, B7H1, B7H2, B7H3, B7H4, B7H5, B7H6, B7H7, B7RP1, B7-4, C3, C5, CCL2, CCL3, CCL4, CCL5, CCL7, CCL8, CCL11, CCL15, CCL17, CCL19, CCL20, CCL21, CCL25, CCR3, CCR4, CD16A, CD19, CD20, CD24, CD27, CD28, CD30, CD38, CD39, CD40, CD40L, CD47, CD52, CD70, CD80, CD86, CD123, CD133, CD137, CD137L, CD160, CD272, CEACAM5, CLEC9, CLEC91, CRTH2, CSF-1, CSF-2, CSF-3, CXCL1, CXCL2, CXCL4, CXCL12, CXCL13, CXCR3, cMet, CTLA4, DLL3, DLL4, DNGR-1, E-cadherin, EGFR, ENTPD1, EpCAM, FCER1, FCER1A, FCER2, FGFR, FLAP, FOLH1, Gi24, GITR, GITRL, GPR5, GP100, GPRC5D, HER2, HER3, ICOSL, ICOS, HHLA2, HMGB1, HVEM, IDO, IFNa, IgE, IGF1R, IL2Rbeta, IL1, ILIA, IL1B, IL1F10, IL2, IL4, IL4Ra, IL5, IL5R, IL6, IL7, IL7Ra, IL8, IL9, IL9R, IL10, rhILlO, IL12, IL13, IL13Ra1, IL13Ra2, IL15, IL17, IL17Rb, IL18, IL22, IL23, IL25, IL7, IL33, IL35, ITGB4, ITK, KIR, LAG3, LAMP1, leptin, LPFS2, MHC class II, MUC-1, MUC-16, NCR3LG1, NKG2D, NKp46, NTPDase-1, OX40, OX40L, PD-1, PD-L1, PD-L2, PROM1, S152, SIRPalpha, SISP1, SLC, SPG64, ST2, STEAP1, STEAP2, Syk kinase, STEAP1, TROP2, TACI, TDO, TGFBETA, T14, TIGIT, TIM3, TLR, TLR2, TLR4, TLR5, TLR9, TMEF1, TNFa, TNFRSF7, Tp55, TREM1, TSLP, TSLPR, TWEAK, VEGF, VISTA, Vstm3, or WUCAM, or combinations thereof. For example, the VL3 may specifically bind to CD3. For example, the VL3 may specifically bind to Trop2. For example, the VL3 may specifically bind to cMet. For example, the VL3 may specifically bind to CD19. For example, the VL3 may specifically bind to CD20. In some aspects, the antigen binding polypeptide complex comprises a VL4 that specifically binds to A2AR, APRIL, ATPDase, BAFF, BAFFR, BCMA, BlyS, BTK, BTLA, B7DC, B7H1, B7H2, B7H3, B7H4, B7H5, B7H6, B7H7, B7RP1, B7-4, C3, C5, CCL2, CCL3, CCL4, CCL5, CCL7, CCL8, CCL11, CCL15, CCL17, CCL19, CCL20, CCL21, CCL25, CCR3, CCR4, CD16A, CD19, CD20, CD24, CD27, CD28, CD30, CD38, CD39, CD40, CD40L, CD47, CD52, CD70, CD80, CD86, CD123, CD133, CD137, CD137L, CD160, CD272, CEACAM5, CLEC9, CLEC91, CRTH2, CSF-1, CSF-2, CSF-3, CXCL1, CXCL2, CXCL4, CXCL12, CXCL13, CXCR3, cMet, CTLA4, DLL3, DLL4, DNGR-1, E-cadherin, EGFR, ENTPD1, EpCAM, FCER1, FCER1A, FCER2, FGFR, FLAP, FOLH1, Gi24, GITR, GITRL, GPR5, GP100, GPRC5D, HER2, HER3, ICOSL, ICOS, HHLA2, HMGB1, HVEM, IDO, IFNa, IgE, IGF1R, IL2Rbeta, IL1, ILIA, IL1B, IL1F10, IL2, IL4, IL4Ra, IL5, IL5R, IL6, IL7, IL7Ra, IL8, IL9, IL9R, IL10, rhILlO, IL12, IL13, IL13Ra1, IL13Ra2, IL15, IL17, IL17Rb, IL18, IL22, IL23, IL25, IL7, IL33, IL35, ITGB4, ITK, KIR, LAG3, LAMP1, leptin, LPFS2, MHC class II, MUC-1, MUC-16, NCR3LG1, NKG2D, NKp46, NTPDase-1, OX40, OX40L, PD-1, PD-L1, PD-L2, PROM1, S152, SIRPalpha, SISP1, SLC, SPG64, ST2, STEAP1, STEAP2, Syk kinase, STEAP1, TROP2, TACI, TDO, TGFBETA, T14, TIGIT, TIM3, TLR, TLR2, TLR4, TLR5, TLR9, TMEF1, TNFa, TNFRSF7, Tp55, TREM1, TSLP, TSLPR, TWEAK, VEGF, VISTA, Vstm3, or WUCAM, or combinations thereof. For example, the VL4 may specifically bind to CD3. For example, the VL4 may specifically bind to Trop2. For example, the VL4 may specifically bind to cMet. For example, the VL4 may specifically bind to CD19. For example, the VL4 may specifically bind to CD20. In some aspects, the antigen binding polypeptide complex comprises a VH1 that specifically binds to A2AR, APRIL, ATPDase, BAFF, BAFFR, BCMA, BlyS, BTK, BTLA, B7DC, B7H1, B7H2, B7H3, B7H4, B7H5, B7H6, B7H7, B7RP1, B7-4, C3, C5, CCL2, CCL3, CCL4, CCL5, CCL7, CCL8, CCL11, CCL15, CCL17, CCL19, CCL20, CCL21, CCL25, CCR3, CCR4, CD16A, CD19, CD20, CD24, CD27, CD28, CD30, CD38, CD39, CD40, CD40L, CD47, CD52, CD70, CD80, CD86, CD123, CD133, CD137, CD137L, CD160, CD272, CEACAM5, CLEC9, CLEC91, CRTH2, CSF-1, CSF-2, CSF-3, CXCL1, CXCL2, CXCL4, CXCL12, CXCL13, CXCR3, cMet, CTLA4, DLL3, DLL4, DNGR-1, E-cadherin, EGFR, ENTPD1, EpCAM, FCER1, FCER1A, FCER2, FGFR, FLAP, FOLH1, Gi24, GITR, GITRL, GPR5, GP100, GPRC5D, HER2, HER3, ICOSL, ICOS, HHLA2, HMGB1, HVEM, IDO, IFNa, IgE, IGF1R, IL2Rbeta, IL1, ILIA, IL1B, IL1F10, IL2, IL4, IL4Ra, IL5, IL5R, IL6, IL7, IL7Ra, IL8, IL9, IL9R, IL10, rhILlO, IL12, IL13, IL13Ra1, IL13Ra2, IL15, IL17, IL17Rb, IL18, IL22, IL23, IL25, IL7, IL33, IL35, ITGB4, ITK, KIR, LAG3, LAMP1, leptin, LPFS2, MHC class II, MUC-1, MUC-16, NCR3LG1, NKG2D, NKp46, NTPDase-1, OX40, OX40L, PD-1, PD-L1, PD-L2, PROM1, S152, SIRPalpha, SISP1, SLC, SPG64, ST2, STEAP1, STEAP2, Syk kinase, STEAP1, TROP2, TACI, TDO, TGFBETA, T14, TIGIT, TIM3, TLR, TLR2, TLR4, TLR5, TLR9, TMEF1, TNFa, TNFRSF7, Tp55, TREM1, TSLP, TSLPR, TWEAK, VEGF, VISTA, Vstm3, or WUCAM, or combinations thereof. For example, the VH1 may specifically bind to CD3. For example, the VH1 may specifically bind to Trop2. For example, the VH1 may specifically bind to cMet. For example, the VH1 may specifically bind to CD19. For example, the VH1 may specifically bind to CD20. In some aspects, the antigen binding polypeptide complex comprises a VH2 that specifically binds to A2AR, APRIL, ATPDase, BAFF, BAFFR, BCMA, BlyS, BTK, BTLA, B7DC, B7H1, B7H2, B7H3, B7H4, B7H5, B7H6, B7H7, B7RP1, B7-4, C3, C5, CCL2, CCL3, CCL4, CCL5, CCL7, CCL8, CCL11, CCL15, CCL17, CCL19, CCL20, CCL21, CCL25, CCR3, CCR4, CD16A, CD19, CD20, CD24, CD27, CD28, CD30, CD38, CD39, CD40, CD40L, CD47, CD52, CD70, CD80, CD86, CD123, CD133, CD137, CD137L, CD160, CD272, CEACAM5, CLEC9, CLEC91, CRTH2, CSF-1, CSF-2, CSF-3, CXCL1, CXCL2, CXCL4, CXCL12, CXCL13, CXCR3, cMet, CTLA4, DLL3, DLL4, DNGR-1, E-cadherin, EGFR, ENTPD1, EpCAM, FCER1, FCER1A, FCER2, FGFR, FLAP, FOLH1, Gi24, GITR, GITRL, GPR5, GP100, GPRC5D, HER2, HER3, ICOSL, ICOS, HHLA2, HMGB1, HVEM, IDO, IFNa, IgE, IGF1R, IL2Rbeta, IL1, ILIA, IL1B, IL1F10, IL2, IL4, IL4Ra, IL5, IL5R, IL6, IL7, IL7Ra, IL8, IL9, IL9R, IL10, rhILlO, IL12, IL13, IL13Ra1, IL13Ra2, IL15, IL17, IL17Rb, IL18, IL22, IL23, IL25, IL7, IL33, IL35, ITGB4, ITK, KIR, LAG3, LAMP1, leptin, LPFS2, MHC class II, MUC-1, MUC-16, NCR3LG1, NKG2D, NKp46, NTPDase-1, OX40, OX40L, PD-1, PD-L1, PD-L2, PROM1, S152, SIRPalpha, SISP1, SLC, SPG64, ST2, STEAP1, STEAP2, Syk kinase, STEAP1, TROP2, TACI, TDO, TGFBETA, T14, TIGIT, TIM3, TLR, TLR2, TLR4, TLR5, TLR9, TMEF1, TNFa, TNFRSF7, Tp55, TREM1, TSLP, TSLPR, TWEAK, VEGF, VISTA, Vstm3, or WUCAM, or combinations thereof. For example, the VH2 may specifically bind to CD3. For example, the VH2 may specifically bind to Trop2. For example, the VH2 may specifically bind to cMet. For example, the VH2 may specifically bind to CD19. For example, the VH2 may specifically bind to CD20. In some aspects, the antigen binding polypeptide complex comprises a VH3 that specifically binds to A2AR, APRIL, ATPDase, BAFF, BAFFR, BCMA, BlyS, BTK, BTLA, B7DC, B7H1, B7H2, B7H3, B7H4, B7H5, B7H6, B7H7, B7RP1, B7-4, C3, C5, CCL2, CCL3, CCL4, CCL5, CCL7, CCL8, CCL11, CCL15, CCL17, CCL19, CCL20, CCL21, CCL25, CCR3, CCR4, CD16A, CD19, CD20, CD24, CD27, CD28, CD30, CD38, CD39, CD40, CD40L, CD47, CD52, CD70, CD80, CD86, CD123, CD133, CD137, CD137L, CD160, CD272, CEACAM5, CLEC9, CLEC91, CRTH2, CSF-1, CSF-2, CSF-3, CXCL1, CXCL2, CXCL4, CXCL12, CXCL13, CXCR3, cMet, CTLA4, DLL3, DLL4, DNGR-1, E-cadherin, EGFR, ENTPD1, EpCAM, FCER1, FCER1A, FCER2, FGFR, FLAP, FOLH1, Gi24, GITR, GITRL, GPR5, GP100, GPRC5D, HER2, HER3, ICOSL, ICOS, HHLA2, HMGB1, HVEM, IDO, IFNa, IgE, IGF1R, IL2Rbeta, IL1, ILIA, IL1B, IL1F10, IL2, IL4, IL4Ra, IL5, IL5R, IL6, IL7, IL7Ra, IL8, IL9, IL9R, IL10, rhILlO, IL12, IL13, IL13Ra1, IL13Ra2, IL15, IL17, IL17Rb, IL18, IL22, IL23, IL25, IL7, IL33, IL35, ITGB4, ITK, KIR, LAG3, LAMP1, leptin, LPFS2, MHC class II, MUC-1, MUC-16, NCR3LG1, NKG2D, NKp46, NTPDase-1, OX40, OX40L, PD-1, PD-L1, PD-L2, PROM1, S152, SIRPalpha, SISP1, SLC, SPG64, ST2, STEAP1, STEAP2, Syk kinase, STEAP1, TROP2, TACI, TDO, TGFBETA, T14, TIGIT, TIM3, TLR, TLR2, TLR4, TLR5, TLR9, TMEF1, TNFa, TNFRSF7, Tp55, TREM1, TSLP, TSLPR, TWEAK, VEGF, VISTA, Vstm3, or WUCAM, or combinations thereof. For example, the VH3 may specifically bind to CD3. For example, the VH3 may specifically bind to Trop2. For example, the VH3 may specifically bind to cMet. For example, the VH3 may specifically bind to CD19. For example, the VH3 may specifically bind to CD20. In some aspects, the antigen binding polypeptide complex comprises a VH4 that specifically binds to A2AR, APRIL, ATPDase, BAFF, BAFFR, BCMA, BlyS, BTK, BTLA, B7DC, B7H1, B7H2, B7H3, B7H4, B7H5, B7H6, B7H7, B7RP1, B7-4, C3, C5, CCL2, CCL3, CCL4, CCL5, CCL7, CCL8, CCL11, CCL15, CCL17, CCL19, CCL20, CCL21, CCL25, CCR3, CCR4, CD16A, CD19, CD20, CD24, CD27, CD28, CD30, CD38, CD39, CD40, CD40L, CD47, CD52, CD70, CD80, CD86, CD123, CD133, CD137, CD137L, CD160, CD272, CEACAM5, CLEC9, CLEC91, CRTH2, CSF-1, CSF-2, CSF-3, CXCL1, CXCL2, CXCL4, CXCL12, CXCL13, CXCR3, cMet, CTLA4, DLL3, DLL4, DNGR-1, E-cadherin, EGFR, ENTPD1, EpCAM, FCER1, FCER1A, FCER2, FGFR, FLAP, FOLH1, Gi24, GITR, GITRL, GPR5, GP100, GPRC5D, HER2, HER3, ICOSL, ICOS, HHLA2, HMGB1, HVEM, IDO, IFNa, IgE, IGF1R, IL2Rbeta, IL1, ILIA, IL1B, IL1F10, IL2, IL4, IL4Ra, IL5, IL5R, IL6, IL7, IL7Ra, IL8, IL9, IL9R, IL10, rhILlO, IL12, IL13, IL13Ra1, IL13Ra2, IL15, IL17, IL17Rb, IL18, IL22, IL23, IL25, IL7, IL33, IL35, ITGB4, ITK, KIR, LAG3, LAMP1, leptin, LPFS2, MHC class II, MUC-1, MUC-16, NCR3LG1, NKG2D, NKp46, NTPDase-1, OX40, OX40L, PD-1, PD-L1, PD-L2, PROM1, S152, SIRPalpha, SISP1, SLC, SPG64, ST2, STEAP1, STEAP2, Syk kinase, STEAP1, TROP2, TACI, TDO, TGFBETA, T14, TIGIT, TIM3, TLR, TLR2, TLR4, TLR5, TLR9, TMEF1, TNFa, TNFRSF7, Tp55, TREM1, TSLP, TSLPR, TWEAK, VEGF, VISTA, Vstm3, or WUCAM, or combinations thereof. For example, the VH4 may specifically bind to CD3. For example, the VH4 may specifically bind to Trop2. For example, the VH4 may specifically bind to cMet. For example, the VH4 may specifically bind to CD19. For example, the VH4 may specifically bind to CD20. In some aspects, the antigen binding polypeptide comprises a VH1 and VL1 that specifically binds to cMet, a VH2 and VL2 that specifically binds to Trop2, a VH3 and VL3 that specifically binds to CD28, and a VH4 and VL4 that specifically binds to CD3. In some aspects, the antigen binding polypeptide comprises a VH1 and VL1 that specifically binds to Trop2, a VH2 and VL2 that specifically binds to cMet, a VH3 and VL3 that specifically binds to CD28, and a VH4 and VL4 that specifically binds to CD3. In some aspects, the antigen binding polypeptide comprises a VH1 and VL1 that specifically binds to cMet, a VH2 and VL2 that specifically binds to CD28, a VH3 and VL3 that specifically binds to Trop2, and a VH4 and VL4 that specifically binds to CD3. In some aspects, the antigen binding polypeptide comprises a VH1 and VL1 that specifically binds to Trop2, a VH2 and VL2 that specifically binds to CD28, a VH3 and VL3 that specifically binds to cMet, and a VH4 and VL4 that specifically binds to CD3. In some aspects, the antigen binding polypeptide comprises a VH1 and VL1 that specifically binds to CD28, a VH2 and VL2 that specifically binds to cMet, a VH3 and VL3 that specifically binds to Trop2, and VH4 and VL4 that specifically binds to CD3. In some aspects, the antigen binding polypeptide comprises a VH1 and VL1 that specifically binds to CD28, a VH2 and VL2 that specifically binds to Trop2, a VH3 and VL3 that specifically binds to cMet, and VH4 and VL4 that specifically binds to CD3. In some aspects, the antigen binding polypeptide comprises a VH1 and VL1 that specifically binds to CD19, a VH2 and VL2 that specifically binds to CD20, a VH3 and VL3 that specifically binds to CD28, and VH4 and VL4 that specifically binds to CD3. In some aspects, the antigen binding polypeptide comprises a VH1 and VL1 that specifically binds to CD20, a VH2 and VL2 that specifically binds to CD19, a VH3 and VL3 that specifically binds to CD28, and VH4 and VL4 that specifically binds to CD3. In some aspects, the antigen binding polypeptide comprises a VH1 and VL1 that specifically binds to CD19, a VH2 and VL2 that specifically binds to CD28, a VH3 and VL3 that specifically binds to CD20, and VH4 and VL4 that specifically binds to CD3. In some aspects, the antigen binding polypeptide comprises a VH1 and VL1 that specifically binds to CD20, a VH2 and VL2 that specifically binds to CD28, a VH3 and VL3 that specifically binds to CD19, and VH4 and VL4 that specifically binds to CD3. In some aspects, the antigen binding polypeptide comprises a VH1 and VL1 that specifically binds to CD28, a VH2 and VL2 that specifically binds to CD19, a VH3 and VL3 that specifically binds to CD20, and VH4 and VL4 that specifically binds to CD3. In some aspects, the antigen binding polypeptide comprises a VH1 and VL1 that specifically binds to CD28, a VH2 and VL2 that specifically binds to CD20, a VH3 and VL3 that specifically binds to CD19, and VH4 and VL4 that specifically binds to CD3. For the avoidance of doubt, all the antigen binding polypeptide complex structures described herein can be combined with any one or more of the targets described herein. Any and all disclosure herein in relation to targets for antigen binding polypeptide complexes of the invention is generally applicable, and applies equally and without reservation to each and every antigen binding polypeptide complex described herein. The VL1, VL2, VL3, VL4, VH1, VH2, VH3, and/or VH4 of each and every antigen binding polypeptide complex described herein may independently bind to any one of said particularly preferred targets.

[0142] In some aspects, an antigen binding polypeptide complex of the invention comprises a VL that specifically binds to a TAA, the VL having a CDR1 comprising an amino acid sequence having at least 90% identity, at least 95% identity, or 100% identity to any one of SEQ ID NOs:67, 75, 83, 91, 107, 115, 123, 131, 385, 405, 415, 441, 452, 462, 472, 655, 691, 727, 393, 486, 504, 536, 548, 753, 789, 825, 871, 879, 490, 496, 745, 781, 817, 645, 681, 771, 843, 621, 637, 673, 709 and 871; a CDR2 comprising an amino acid sequence having at least 90% identity, at least 95% identity, or 100% identity to any one of SEQ ID NOs:68, 76, 84, 92, 108, 116, 124, 132, 386 (YTS); 406 (YTS), 416 (YTS), 442 (YTS), 453 (YTS), 463 (YTS), 473 (YTS), 656, 692, 728, 394, 487 (AT), 505 (AT), 537, 549, 754, 790, 826, 872, 880, 491 (DA), 497 (DA), 746, 782, 818, 646, 682, 772, 844, 622, 638, 674, 710 and 872; and a CDR3 comprising an amino acid sequence having at least 90% identity, at least 95% identity, or 100% identity to any one of SEQ ID NOs:69, 77, 85, 93, 109, 117, 125, 133, 387, 407, 417, 443, 454, 464, 474, 657, 693, 729, 395, 488, 506, 538, 550, 755, 791, 827, 873, 881, 492, 498, 747, 783, 819, 647, 683, 773, 845, 623, 639, 675, 711 and 873; and a VH that specifically binds to a TAA, the VH having a CDR1 comprising an amino acid sequence having at least 90% identity, at least 95% identity, or 100% identity to any one of SEQ ID NOs:64, 72, 80, 88, 104, 112, 120, 128, 389, 409, 419, 429, 659, 695, 731, 397, 508, 540, 552, 757, 793, 829, 875, 500, 749, 785, 821, 649, 685, 775, 847, 625, 641, 677, 713 and 867; a CDR2 comprising an amino acid sequence having at least 90% identity, at least 95% identity, or 100% identity to any one of SEQ ID NOs:65, 73, 81, 89, 105, 113, 121, 129, 390, 410, 420, 430, 660, 696, 732, 398, 509, 541, 553, 758, 794, 830, 876, 501, 750, 786, 822, 650, 686, 776, 848, 626, 642, 678, 714 and 868; and a CDR3 comprising an amino acid sequence having at least 90% identity, at least 95% identity, or 100% identity to any one of SEQ ID NOs:66, 74, 82, 90, 106, 114, 122, 130, 391, 411, 421, 431, 661, 697, 733, 399, 510, 542, 554, 759, 795, 831, 877, 502, 751, 787, 823, 651, 687, 777, 849, 627, 643, 679, 715 and 869.

[0143] 43) In some aspects, the VL that specifically binds to CD38 comprises a CDR1 comprising an amino acid sequence having at least 90% identity to SEQ ID NO: 67; a CDR2 comprising an amino acid sequence having at least 90% identity to SEQ ID NO:68; and a CDR3 comprising an amino acid sequence having at least 90% identity to SEQ ID NO:69; and the VH that specifically binds to CD38 comprises a CDR1 comprising an amino acid sequence having at least 90% identity to SEQ ID NO:64; a CDR2 comprising an amino acid sequence having at least 90% identity to SEQ ID NO:65; and a CDR3 comprising an amino acid sequence having at least 90% identity to SEQ ID NO:66. In some aspects, the VL that specifically binds to cMet comprises a CDR1 comprising an amino acid sequence having at least 90% identity to SEQ ID NO:75; a CDR2 comprising an amino acid sequence having at least 90% identity to SEQ ID NO:76; and a CDR3 comprising an amino acid sequence having at least 90% identity to SEQ ID NO:77; and the VH that specifically binds to cMet comprises a CDR1 comprising an amino acid sequence having at least 90% identity to SEQ ID NO:72; a CDR2 comprising an amino acid sequence having at least 90% identity to SEQ ID NO:73; and a CDR3 comprising an amino acid sequence having at least 90% identity to SEQ ID NO:74. In some aspects, the VL that specifically binds to Trop2 comprises a CDR1 comprising an amino acid sequence having at least 90% identity to SEQ ID NO:83; a CDR2 comprising an amino acid sequence having at least 90% identity to SEQ ID NO:84; and a CDR3 comprising an amino acid sequence having at least 90% identity to SEQ ID NO:85; and the VH that specifically binds to Trop2 comprises a CDR1 comprising an amino acid sequence having at least 90% identity to SEQ ID NO:80; a CDR2 comprising an amino acid sequence having at least 90% identity to SEQ ID NO:81; and a CDR3 comprising an amino acid sequence having at least 90% identity to SEQ ID NO:82. In some aspects, the VL that specifically binds to Trop2 comprises a CDR1 comprising an amino acid sequence having at least 90% identity to SEQ ID NO:91; a CDR2 comprising an amino acid sequence having at least 90% identity to SEQ ID NO:92; and a CDR3 comprising an amino acid sequence having at least 90% identity to SEQ ID NO:93; and the VH that specifically binds to Trop2 comprises a CDR1 comprising an amino acid sequence having at least 90% identity to SEQ ID NO:88; a CDR2 comprising an amino acid sequence having at least 90% identity to SEQ ID NO:89; and a CDR3 comprising an amino acid sequence having at least 90% identity to SEQ ID NO:90. In some aspects, the VL that specifically binds to CD3 comprises a CDR1 comprising an amino acid sequence having at least 90% identity to SEQ ID NO:99; a CDR2 comprising an amino acid sequence having at least 90% identity to SEQ ID NO: 100; and a CDR3 comprising an amino acid sequence having at least 90% identity to SEQ ID NO:101; and the VH that specifically binds to CD3 comprises a CDR1 comprising an amino acid sequence having at least 90% identity to SEQ ID NO:96; a CDR2 comprising an amino acid sequence having at least 90% identity to SEQ ID NO:97; and a CDR3 comprising an amino acid sequence having at least 90% identity to SEQ ID NO:98. In some aspects, the VL that specifically binds to CD20 comprises a CDR1 comprising an amino acid sequence having at least 90% identity to SEQ ID NO: 107 a CDR2 comprising an amino acid sequence having at least 90% identity to SEQ ID NO:108; and a CDR3 comprising an amino acid sequence having at least 90% identity to SEQ ID NO:109; and the VH that specifically binds to CD20 comprises a CDR1 comprising an amino acid sequence having at least 90% identity to SEQ ID NO:104; a CDR2 comprising an amino acid sequence having at least 90% identity to SEQ ID NO:105; and a CDR3 comprising an amino acid sequence having at least 90% identity to SEQ ID NO:106. In some aspects, the VL that specifically binds to CD20 comprises a CDR1 comprising an amino acid sequence having at least 90% identity to SEQ ID NO:115; a CDR2 comprising an amino acid sequence having at least 90% identity to SEQ ID NO: 116; and a CDR3 comprising an amino acid sequence having at least 90% identity to SEQ ID NO: 117; and the VH that specifically binds to CD20 comprises a CDR1 comprising an amino acid sequence having at least 90% identity to SEQ ID NO:112; a CDR2 comprising an amino acid sequence having at least 90% identity to SEQ ID NO:113; and a CDR3 comprising an amino acid sequence having at least 90% identity to SEQ ID NO:114. In some aspects, the VL that specifically binds to CD19 comprises a CDR1 comprising an amino acid sequence having at least 90% identity to SEQ ID NO:123; a CDR2 comprising an amino acid sequence having at least 90% identity to SEQ ID NO: 124; and a CDR3 comprising an amino acid sequence having at least 90% identity to SEQ ID NO:125; and the VH that specifically binds to CD19 comprises a CDR1 comprising an amino acid sequence having at least 90% identity to SEQ ID NO:120; a CDR2 comprising an amino acid sequence having at least 90% identity to SEQ ID NO:121; and a CDR3 comprising an amino acid sequence having at least 90% identity to SEQ ID NO:122. In some aspects, the VL that specifically binds to CD19 comprises a CDR1 comprising an amino acid sequence having at least 90% identity to SEQ ID NO:131; a CDR2 comprising an amino acid sequence having at least 90% identity to SEQ ID NO: 132; and a CDR3 comprising an amino acid sequence having at least 90% identity to SEQ ID NO:133; and the VH that specifically binds to CD19 comprises a CDR1 comprising an amino acid sequence having at least 90% identity to SEQ ID NO:128; a CDR2 comprising an amino acid sequence having at least 90% identity to SEQ ID NO: 129; and a CDR3 comprising an amino acid sequence having at least 90% identity to SEQ ID NO:130. In some aspects, the VL that specifically binds to Trop2 comprises a CDR1 comprising an amino acid sequence having at least 90% identity to SEQ ID NO: 385; a CDR2 comprising an amino acid sequence having at least 90% identity to SEQ ID NO:386 (YTS); and a CDR3 comprising an amino acid sequence having at least 90% identity to SEQ ID NO:387; and the VH that specifically binds to Trop2 comprises a CDR1 comprising an amino acid sequence having at least 90% identity to SEQ ID NO:389; a CDR2 comprising an amino acid sequence having at least 90% identity to SEQ ID NO:390; and a CDR3 comprising an amino acid sequence having at least 90% identity to SEQ ID NO:391. In some aspects, the VL that specifically binds to Trop2 comprises a CDR1 comprising an amino acid sequence having at least 90% identity to SEQ ID NO: 405; a CDR2 comprising an amino acid sequence having at least 90% identity to SEQ ID NO:406 (YTS); and a CDR3 comprising an amino acid sequence having at least 90% identity to SEQ ID NO:407; and the VH that specifically binds to Trop2 comprises a CDR1 comprising an amino acid sequence having at least 90% identity to SEQ ID NO:409; a CDR2 comprising an amino acid sequence having at least 90% identity to SEQ ID NO:410; and a CDR3 comprising an amino acid sequence having at least 90% identity to SEQ ID NO:411. In some aspects, the VL that specifically binds to Trop2 comprises a CDR1 comprising an amino acid sequence having at least 90% identity to SEQ ID NO: 415; a CDR2 comprising an amino acid sequence having at least 90% identity to SEQ ID NO:416 (YTS); and a CDR3 comprising an amino acid sequence having at least 90% identity to SEQ ID NO:417; and the VH that specifically binds to Trop2 comprises a CDR1 comprising an amino acid sequence having at least 90% identity to SEQ ID NO:419; a CDR2 comprising an amino acid sequence having at least 90% identity to SEQ ID NO:420; and a CDR3 comprising an amino acid sequence having at least 90% identity to SEQ ID NO:421. In some aspects, the VL that specifically binds to Trop2 comprises a CDR1 comprising an amino acid sequence having at least 90% identity to SEQ ID NO: 441; a CDR2 comprising an amino acid sequence having at least 90% identity to SEQ ID NO:442 (YTS); and a CDR3 comprising an amino acid sequence having at least 90% identity to SEQ ID NO:443; and the VH that specifically binds to Trop2 comprises a CDR1 comprising an amino acid sequence having at least 90% identity to SEQ ID NO:429; a CDR2 comprising an amino acid sequence having at least 90% identity to SEQ ID NO:430; and a CDR3 comprising an amino acid sequence having at least 90% identity to SEQ ID NO:431. In some aspects, the VL that specifically binds to Trop2 comprises a CDR1 comprising an amino acid sequence having at least 90% identity to SEQ ID NO: 452; a CDR2 comprising an amino acid sequence having at least 90% identity to SEQ ID NO:453 (YTS); and a CDR3 comprising an amino acid sequence having at least 90% identity to SEQ ID NO:454; and the VH that specifically binds to Trop2 comprises a CDR1 comprising an amino acid sequence having at least 90% identity to SEQ ID NO:429; a CDR2 comprising an amino acid sequence having at least 90% identity to SEQ ID NO:430; and a CDR3 comprising an amino acid sequence having at least 90% identity to SEQ ID NO:431. In some aspects, the VL that specifically binds to Trop2 comprises a CDR1 comprising an amino acid sequence having at least 90% identity to SEQ ID NO: 462; a CDR2 comprising an amino acid sequence having at least 90% identity to SEQ ID NO:463 (YTS); and a CDR3 comprising an amino acid sequence having at least 90% identity to SEQ ID NO:464; and the VH that specifically binds to Trop2 comprises a CDR1 comprising an amino acid sequence having at least 90% identity to SEQ ID NO:429; a CDR2 comprising an amino acid sequence having at least 90% identity to SEQ ID NO:430; and a CDR3 comprising an amino acid sequence having at least 90% identity to SEQ ID NO:431. In some aspects, the VL that specifically binds to Trop2 comprises a CDR1 comprising an amino acid sequence having at least 90% identity to SEQ ID NO: 472; a CDR2 comprising an amino acid sequence having at least 90% identity to SEQ ID NO:473 (YTS); and a CDR3 comprising an amino acid sequence having at least 90% identity to SEQ ID NO:474; and the VH that specifically binds to Trop2 comprises a CDR1 comprising an amino acid sequence having at least 90% identity to SEQ ID NO:429; a CDR2 comprising an amino acid sequence having at least 90% identity to SEQ ID NO:430; and a CDR3 comprising an amino acid sequence having at least 90% identity to SEQ ID NO:431. In some aspects, the VL that specifically binds to Trop2 comprises a CDR1 comprising an amino acid sequence having at least 90% identity to SEQ ID NO: 655; a CDR2 comprising an amino acid sequence having at least 90% identity to SEQ ID NO:656; and a CDR3 comprising an amino acid sequence having at least 90% identity to SEQ ID NO:657; and the VH that specifically binds to Trop2 comprises a CDR1 comprising an amino acid sequence having at least 90% identity to SEQ ID NO:659; a CDR2 comprising an amino acid sequence having at least 90% identity to SEQ ID NO:660; and a CDR3 comprising an amino acid sequence having at least 90% identity to SEQ ID NO:661. In some aspects, the VL that specifically binds to Trop2 comprises a CDR1 comprising an amino acid sequence having at least 90% identity to SEQ ID NO: 691; a CDR2 comprising an amino acid sequence having at least 90% identity to SEQ ID NO:692; and a CDR3 comprising an amino acid sequence having at least 90% identity to SEQ ID NO:693; and the VH that specifically binds to Trop2 comprises a CDR1 comprising an amino acid sequence having at least 90% identity to SEQ ID NO:695; a CDR2 comprising an amino acid sequence having at least 90% identity to SEQ ID NO:696; and a CDR3 comprising an amino acid sequence having at least 90% identity to SEQ ID NO:697. In some aspects, the VL that specifically binds to Trop2 comprises a CDR1 comprising an amino acid sequence having at least 90% identity to SEQ ID NO: 727; a CDR2 comprising an amino acid sequence having at least 90% identity to SEQ ID NO:728; and a CDR3 comprising an amino acid sequence having at least 90% identity to SEQ ID NO:729; and the VH that specifically binds to Trop2 comprises a CDR1 comprising an amino acid sequence having at least 90% identity to SEQ ID NO:731; a CDR2 comprising an amino acid sequence having at least 90% identity to SEQ ID NO:732; and a CDR3 comprising an amino acid sequence having at least 90% identity to SEQ ID NO:733. In some aspects, the VL that specifically binds to HER2 comprises a CDR1 comprising an amino acid sequence having at least 90% identity to SEQ ID NO: 393; a CDR2 comprising an amino acid sequence having at least 90% identity to SEQ ID NO:394; and a CDR3 comprising an amino acid sequence having at least 90% identity to SEQ ID NO:395; and the VH that specifically binds to HER2 comprises a CDR1 comprising an amino acid sequence having at least 90% identity to SEQ ID NO:397; a CDR2 comprising an amino acid sequence having at least 90% identity to SEQ ID NO:398; and a CDR3 comprising an amino acid sequence having at least 90% identity to SEQ ID NO:399. In some aspects, the VL that specifically binds to CD20 comprises a CDR1 comprising an amino acid sequence having at least 90% identity to SEQ ID NO: 486; a CDR2 comprising an amino acid sequence having at least 90% identity to SEQ ID NO:487 (AT); and a CDR3 comprising an amino acid sequence having at least 90% identity to SEQ ID NO:488; and the VH that specifically binds to CD20 comprises a CDR1 comprising an amino acid sequence having at least 90% identity to SEQ ID NO:508; a CDR2 comprising an amino acid sequence having at least 90% identity to SEQ ID NO:509; and a CDR3 comprising an amino acid sequence having at least 90% identity to SEQ ID NO:510. In some aspects, the VL that specifically binds to CD20 comprises a CDR1 comprising an amino acid sequence having at least 90% identity to SEQ ID NO: 504; a CDR2 comprising an amino acid sequence having at least 90% identity to SEQ ID NO:505 (AT); and a CDR3 comprising an amino acid sequence having at least 90% identity to SEQ ID NO:506; and the VH that specifically binds to CD20 comprises a CDR1 comprising an amino acid sequence having at least 90% identity to SEQ ID NO:508; a CDR2 comprising an amino acid sequence having at least 90% identity to SEQ ID NO:509; and a CDR3 comprising an amino acid sequence having at least 90% identity to SEQ ID NO:510. In some aspects, the VL that specifically binds to CD20 comprises a CDR1 comprising an amino acid sequence having at least 90% identity to SEQ ID NO: 536; a CDR2 comprising an amino acid sequence having at least 90% identity to SEQ ID NO:537; and a CDR3 comprising an amino acid sequence having at least 90% identity to SEQ ID NO:538; and the VH that specifically binds to CD20 comprises a CDR1 comprising an amino acid sequence having at least 90% identity to SEQ ID NO:540; a CDR2 comprising an amino acid sequence having at least 90% identity to SEQ ID NO:541; and a CDR3 comprising an amino acid sequence having at least 90% identity to SEQ ID NO:542. In some aspects, the VL that specifically binds to CD20 comprises a CDR1 comprising an amino acid sequence having at least 90% identity to SEQ ID NO:548; a CDR2 comprising an amino acid sequence having at least 90% identity to SEQ ID NO:549; and a CDR3 comprising an amino acid sequence having at least 90% identity to SEQ ID NO:550; and the VH that specifically binds to CD20 comprises a CDR1 comprising an amino acid sequence having at least 90% identity to SEQ ID NO:552; a CDR2 comprising an amino acid sequence having at least 90% identity to SEQ ID NO:553; and a CDR3 comprising an amino acid sequence having at least 90% identity to SEQ ID NO:554. In some aspects, the VL that specifically binds to CD20 comprises a CDR1 comprising an amino acid sequence having at least 90% identity to SEQ ID NO: 753; a CDR2 comprising an amino acid sequence having at least 90% identity to SEQ ID NO:754; and a CDR3 comprising an amino acid sequence having at least 90% identity to SEQ ID NO:755; and the VH that specifically binds to CD20 comprises a CDR1 comprising an amino acid sequence having at least 90% identity to SEQ ID NO:757; a CDR2 comprising an amino acid sequence having at least 90% identity to SEQ ID NO:758; and a CDR3 comprising an amino acid sequence having at least 90% identity to SEQ ID NO:759. In some aspects, the VL that specifically binds to CD20 comprises a CDR1 comprising an amino acid sequence having at least 90% identity to SEQ ID NO: 789; a CDR2 comprising an amino acid sequence having at least 90% identity to SEQ ID NO:790; and a CDR3 comprising an amino acid sequence having at least 90% identity to SEQ ID NO:791; and the VH that specifically binds to CD20 comprises a CDR1 comprising an amino acid sequence having at least 90% identity to SEQ ID NO:793; a CDR2 comprising an amino acid sequence having at least 90% identity to SEQ ID NO:794; and a CDR3 comprising an amino acid sequence having at least 90% identity to SEQ ID NO:795. In some aspects, the VL that specifically binds to CD20 comprises a CDR1 comprising an amino acid sequence having at least 90% identity to SEQ ID NO: 825; a CDR2 comprising an amino acid sequence having at least 90% identity to SEQ ID NO: 826; and a CDR3 comprising an amino acid sequence having at least 90% identity to SEQ ID NO: 827; and the VH that specifically binds to CD20 comprises a CDR1 comprising an amino acid sequence having at least 90% identity to SEQ ID NO:829; a CDR2 comprising an amino acid sequence having at least 90% identity to SEQ ID NO:830; and a CDR3 comprising an amino acid sequence having at least 90% identity to SEQ ID NO:831. In some aspects, the VL that specifically binds to CD20 comprises a CDR1 comprising an amino acid sequence having at least 90% identity to SEQ ID NO: 871; a CDR2 comprising an amino acid sequence having at least 90% identity to SEQ ID NO:872; and a CDR3 comprising an amino acid sequence having at least 90% identity to SEQ ID NO:873; and the VH that specifically binds to CD20 comprises a CDR1 comprising an amino acid sequence having at least 90% identity to SEQ ID NO:; a CDR2 comprising an amino acid sequence having at least 90% identity to SEQ ID NO:; and a CDR3 comprising an amino acid sequence having at least 90% identity to SEQ ID NO:. In some aspects, the VL that specifically binds to CD20 comprises a CDR1 comprising an amino acid sequence having at least 90% identity to SEQ ID NO: 879; a CDR2 comprising an amino acid sequence having at least 90% identity to SEQ ID NO:880; and a CDR3 comprising an amino acid sequence having at least 90% identity to SEQ ID NO:881; and the VH that specifically binds to CD20 comprises a CDR1 comprising an amino acid sequence having at least 90% identity to SEQ ID NO:875; a CDR2 comprising an amino acid sequence having at least 90% identity to SEQ ID NO:876; and a CDR3 comprising an amino acid sequence having at least 90% identity to SEQ ID NO:877. In some aspects, the VL that specifically binds to CD19 comprises a CDR1 comprising an amino acid sequence having at least 90% identity to SEQ ID NO: 490; a CDR2 comprising an amino acid sequence having at least 90% identity to SEQ ID NO:491 (AT); and a CDR3 comprising an amino acid sequence having at least 90% identity to SEQ ID NO:492; and the VH that specifically binds to CD19 comprises a CDR1 comprising an amino acid sequence having at least 90% identity to SEQ ID NO:500; a CDR2 comprising an amino acid sequence having at least 90% identity to SEQ ID NO:501; and a CDR3 comprising an amino acid sequence having at least 90% identity to SEQ ID NO:502. In some aspects, the VL that specifically binds to CD19 comprises a CDR1 comprising an amino acid sequence having at least 90% identity to SEQ ID NO: 496; a CDR2 comprising an amino acid sequence having at least 90% identity to SEQ ID NO:497 (AT); and a CDR3 comprising an amino acid sequence having at least 90% identity to SEQ ID NO:498; and the VH that specifically binds to CD19 comprises a CDR1 comprising an amino acid sequence having at least 90% identity to SEQ ID NO:500; a CDR2 comprising an amino acid sequence having at least 90% identity to SEQ ID NO:501; and a CDR3 comprising an amino acid sequence having at least 90% identity to SEQ ID NO:502. In some aspects, the VL that specifically binds to CD19 comprises a CDR1 comprising an amino acid sequence having at least 90% identity to SEQ ID NO: 745; a CDR2 comprising an amino acid sequence having at least 90% identity to SEQ ID NO: 746; and a CDR3 comprising an amino acid sequence having at least 90% identity to SEQ ID NO:747; and the VH that specifically binds to CD19 comprises a CDR1 comprising an amino acid sequence having at least 90% identity to SEQ ID NO:749; a CDR2 comprising an amino acid sequence having at least 90% identity to SEQ ID NO:750; and a CDR3 comprising an amino acid sequence having at least 90% identity to SEQ ID NO:751. In some aspects, the VL that specifically binds to CD19 comprises a CDR1 comprising an amino acid sequence having at least 90% identity to SEQ ID NO: 781; a CDR2 comprising an amino acid sequence having at least 90% identity to SEQ ID NO: 782; and a CDR3 comprising an amino acid sequence having at least 90% identity to SEQ ID NO:783; and the VH that specifically binds to CD19 comprises a CDR1 comprising an amino acid sequence having at least 90% identity to SEQ ID NO:785; a CDR2 comprising an amino acid sequence having at least 90% identity to SEQ ID NO:786; and a CDR3 comprising an amino acid sequence having at least 90% identity to SEQ ID NO:787. In some aspects, the VL that specifically binds to CD19 comprises a CDR1 comprising an amino acid sequence having at least 90% identity to SEQ ID NO: 817; a CDR2 comprising an amino acid sequence having at least 90% identity to SEQ ID NO:818; and a CDR3 comprising an amino acid sequence having at least 90% identity to SEQ ID NO:819; and the VH that specifically binds to CD19 comprises a CDR1 comprising an amino acid sequence having at least 90% identity to SEQ ID NO:821; a CDR2 comprising an amino acid sequence having at least 90% identity to SEQ ID NO:822; and a CDR3 comprising an amino acid sequence having at least 90% identity to SEQ ID NO:823. In some aspects, the VL that specifically binds to CD28 comprises a CDR1 comprising an amino acid sequence having at least 90% identity to SEQ ID NO: 645; a CDR2 comprising an amino acid sequence having at least 90% identity to SEQ ID NO:646; and a CDR3 comprising an amino acid sequence having at least 900% identity to SEQ ID NO:647; and the VH that specifically binds to CD28 comprises a CDR1 comprising an amino acid sequence having at least 90% identity to SEQ ID NO:649; a CDR2 comprising an amino acid sequence having at least 90% identity to SEQ ID NO: 650; and a CDR3 comprising an amino acid sequence having at least 90% identity to SEQ ID NO:651. In some aspects, the VL that specifically binds to CD28 comprises a CDR1 comprising an amino acid sequence having at least 90% identity to SEQ ID NO: 681; a CDR2 comprising an amino acid sequence having at least 90% identity to SEQ ID NO:682; and a CDR3 comprising an amino acid sequence having at least 90% identity to SEQ ID NO:683; and the VH that specifically binds to CD28 comprises a CDR1 comprising an amino acid sequence having at least 90% identity to SEQ ID NO:685; a CDR2 comprising an amino acid sequence having at least 90% identity to SEQ ID NO:686; and a CDR3 comprising an amino acid sequence having at least 90% identity to SEQ ID NO: 687. In some aspects, the VL that specifically binds to CD28 comprises a CDR1 comprising an amino acid sequence having at least 90% identity to SEQ ID NO: 771; a CDR2 comprising an amino acid sequence having at least 90% identity to SEQ ID NO:772; and a CDR3 comprising an amino acid sequence having at least 90% identity to SEQ ID NO:773; and the VH that specifically binds to CD28 comprises a CDR1 comprising an amino acid sequence having at least 90% identity to SEQ ID NO:775; a CDR2 comprising an amino acid sequence having at least 90% identity to SEQ ID NO:776; and a CDR3 comprising an amino acid sequence having at least 90% identity to SEQ ID NO:777. In some aspects, the VL that specifically binds to CD28 comprises a CDR1 comprising an amino acid sequence having at least 90% identity to SEQ ID NO: 843; a CDR2 comprising an amino acid sequence having at least 90% identity to SEQ ID NO:844; and a CDR3 comprising an amino acid sequence having at least 90% identity to SEQ ID NO:845; and the VH that specifically binds to CD28 comprises a CDR1 comprising an amino acid sequence having at least 90% identity to SEQ ID NO:847; a CDR2 comprising an amino acid sequence having at least 90% identity to SEQ ID NO: 848; and a CDR3 comprising an amino acid sequence having at least 90% identity to SEQ ID NO:849. In some aspects, the VL that specifically binds to BCMA comprises a CDR1 comprising an amino acid sequence having at least 90% identity to SEQ ID NO: 621; a CDR2 comprising an amino acid sequence having at least 90% identity to SEQ ID NO:622; and a CDR3 comprising an amino acid sequence having at least 90% identity to SEQ ID NO:623; and the VH that specifically binds to BCMA comprises a CDR1 comprising an amino acid sequence having at least 90% identity to SEQ ID NO:625; a CDR2 comprising an amino acid sequence having at least 90% identity to SEQ TD NO:626, and a CDR3 comprising an amino acid sequence having at least 900% identity to SEQ ID NO:627. In some aspects, the VL that specifically binds to cMet comprises a CDR1 comprising an amino acid sequence having at least 90% identity to SEQ ID NO: 637; a CDR2 comprising an amino acid sequence having at least 90% identity to SEQ ID NO:638; and a CDR3 comprising an amino acid sequence having at least 90% identity to SEQ ID NO:639; and the VH that specifically binds to cMet comprises a CDR1 comprising an amino acid sequence having at least 90% identity to SEQ ID NO:641; a CDR2 comprising an amino acid sequence having at least 90% identity to SEQ ID NO:642; and a CDR3 comprising an amino acid sequence having at least 90% identity to SEQ ID NO:643. In some aspects, the VL that specifically binds to cMet comprises a CDR1 comprising an amino acid sequence having at least 90% identity to SEQ ID NO: 673; a CDR2 comprising an amino acid sequence having at least 90% identity to SEQ ID NO:674; and a CDR3 comprising an amino acid sequence having at least 90% identity to SEQ ID NO:675; and the VH that specifically binds to cMet comprises a CDR1 comprising an amino acid sequence having at least 90% identity to SEQ ID NO:677; a CDR2 comprising an amino acid sequence having at least 90% identity to SEQ ID NO:678; and a CDR3 comprising an amino acid sequence having at least 90% identity to SEQ ID NO: 679. In some aspects, the VL that specifically binds to cMet comprises a CDR1 comprising an amino acid sequence having at least 90% identity to SEQ ID NO: 709; a CDR2 comprising an amino acid sequence having at least 90% identity to SEQ ID NO:710; and a CDR3 comprising an amino acid sequence having at least 90% identity to SEQ ID NO:711; and the VH that specifically binds to cMet comprises a CDR1 comprising an amino acid sequence having at least 90% identity to SEQ ID NO:713; a CDR2 comprising an amino acid sequence having at least 90% identity to SEQ ID NO:714; and a CDR3 comprising an amino acid sequence having at least 90% identity to SEQ ID NO:715. In some aspects, the VL that specifically binds to CD20 comprises a CDR1 comprising an amino acid sequence having at least 90% identity to SEQ ID NO:871; a CDR2 comprising an amino acid sequence having at least 90% identity to SEQ ID NO:872; and a CDR3 comprising an amino acid sequence having at least 90% identity to SEQ ID NO:873; and the VH that specifically binds to CD20 comprises a CDR1 comprising an amino acid sequence having at least 90% identity to SEQ ID NO:867; a CDR2 comprising an amino acid sequence having at least 90% identity to SEQ ID NO:868; and a CDR3 comprising an amino acid sequence having at least 90% identity to SEQ ID NO:869. As used herein, “at least 90% identity” includes at least 91%, 92%, 93%, 94%, 95%, 96%, 97%. 98%, 99% and 100% identity to the recited reference sequence. In some aspects, the VL that specifically binds to CD38 comprises a CDR1 comprising the amino acid sequence of SEQ ID NO:67; a CDR2 comprising the amino acid sequence of SEQ ID NO:68; and a CDR3 comprising the amino acid sequence of SEQ ID NO:69; and the VH that specifically binds to CD38 comprises a CDR1 comprising the amino acid sequence of SEQ ID NO:64; a CDR2 comprising the amino acid sequence of SEQ ID NO:65; and a CDR3 comprising the amino acid sequence of SEQ ID NO:66. In some aspects, the VL that specifically binds to cMet comprises a CDR1 comprising the amino acid sequence of SEQ ID NO:75; a CDR2 comprising the amino acid sequence of SEQ ID NO:76; and a CDR3 comprising the amino acid sequence of SEQ ID NO:77; and the VH that specifically binds to cMet comprises a CDR1 comprising the amino acid sequence of SEQ ID NO:72; a CDR2 comprising the amino acid sequence of SEQ ID NO:73; and a CDR3 comprising the amino acid sequence of SEQ ID NO:74. In some aspects, the VL that specifically binds to Trop2 comprises a CDR1 comprising the amino acid sequence of SEQ ID NO:83; a CDR2 comprising the amino acid sequence of SEQ ID NO:84; and a CDR3 comprising the amino acid sequence of SEQ ID NO:85; and the VH that specifically binds to Trop2 comprises a CDR1 comprising the amino acid sequence of SEQ ID NO:80; a CDR2 comprising the amino acid sequence of SEQ ID NO:81; and a CDR3 comprising the amino acid sequence of SEQ ID NO:82. In some aspects, the VL that specifically binds to Trop2 comprises a CDR1 comprising the amino acid sequence of SEQ ID NO:91; a CDR2 comprising the amino acid sequence of SEQ ID NO:92; and a CDR3 comprising the amino acid sequence of SEQ ID NO:93; and the VH that specifically binds to Trop2 comprises a CDR1 comprising the amino acid sequence of SEQ ID NO:88; a CDR2 comprising the amino acid sequence of SEQ ID NO:89; and a CDR3 comprising the amino acid sequence of SEQ ID NO:90. In some aspects, the VL that specifically binds to CD3 comprises a CDR1 comprising the amino acid sequence of SEQ ID NO: 99; a CDR2 comprising the amino acid sequence of SEQ ID NO:100; and a CDR3 comprising the amino acid sequence of SEQ ID NO:101; and the VH that specifically binds to CD3 comprises a CDR1 comprising the amino acid sequence of SEQ ID NO:96; a CDR2 comprising the amino acid sequence of SEQ ID NO:97; and a CDR3 comprising the amino acid sequence of SEQ ID NO:98. In some aspects, the VL that specifically binds to CD20 comprises a CDR1 comprising the amino acid sequence of SEQ ID NO: 107; a CDR2 comprising the amino acid sequence of SEQ ID NO:108; and a CDR3 comprising the amino acid sequence of SEQ ID NO:109; and the VH that specifically binds to CD20 comprises a CDR1 comprising the amino acid sequence of SEQ ID NO:104; a CDR2 comprising the amino acid sequence of SEQ ID NO:105; and a CDR3 comprising the amino acid sequence of SEQ ID NO:106. In some aspects, the VL that specifically binds to CD20 comprises a CDR1 comprising the amino acid sequence of SEQ ID NO: 115; a CDR2 comprising the amino acid sequence of SEQ ID NO:116; and a CDR3 comprising the amino acid sequence of SEQ ID NO:117; and the VH that specifically binds to CD20 comprises a CDR1 comprising the amino acid sequence of SEQ ID NO:112; a CDR2 comprising the amino acid sequence of SEQ ID NO:113; and a CDR3 comprising the amino acid sequence of SEQ ID NO:114. In some aspects, the VL that specifically binds to CD19 comprises a CDR1 comprising the amino acid sequence of SEQ ID NO: 123; a CDR2 comprising the amino acid sequence of SEQ ID NO:124; and a CDR3 comprising the amino acid sequence of SEQ ID NO:125; and the VH that specifically binds to CD19 comprises a CDR1 comprising the amino acid sequence of SEQ ID NO:120; a CDR2 comprising the amino acid sequence of SEQ ID NO:121; and a CDR3 comprising the amino acid sequence of SEQ ID NO:122. In some aspects, the VL that specifically binds to CD19 comprises a CDR1 comprising the amino acid sequence of SEQ ID NO: 131; a CDR2 comprising the amino acid sequence of SEQ ID NO:132; and a CDR3 comprising the amino acid sequence of SEQ ID NO:133; and the VH that specifically binds to CD19 comprises a CDR1 comprising the amino acid sequence of SEQ ID NO:128; a CDR2 comprising the amino acid sequence of SEQ ID NO:129; and a CDR3 comprising the amino acid sequence of SEQ ID NO:130. In some aspects, the VL that specifically binds to Trop2 comprises a CDR1 comprising the amino acid sequence of SEQ ID NO: 385; a CDR2 comprising the amino acid sequence of SEQ ID NO:386 (YTS); and a CDR3 comprising the amino acid sequence of SEQ ID NO:387; and the VH that specifically binds to Trop2 comprises a CDR1 comprising the amino acid sequence of SEQ ID NO:389; a CDR2 comprising the amino acid sequence of SEQ ID NO:390; and a CDR3 comprising the amino acid sequence of SEQ ID NO:391. In some aspects, the VL that specifically binds to Trop2 comprises a CDR1 comprising the amino acid sequence of SEQ ID NO: 405; a CDR2 comprising the amino acid sequence of SEQ ID NO:406 (YTS); and a CDR3 comprising the amino acid sequence of SEQ ID NO:407; and the VH that specifically binds to Trop2 comprises a CDR1 comprising the amino acid sequence of SEQ ID NO:409; a CDR2 comprising the amino acid sequence of SEQ ID NO:410; and a CDR3 comprising the amino acid sequence of SEQ ID NO:411. In some aspects, the VL that specifically binds to Trop2 comprises a CDR1 comprising the amino acid sequence of SEQ ID NO: 415; a CDR2 comprising the amino acid sequence of SEQ ID NO:416 (YTS); and a CDR3 comprising the amino acid sequence of SEQ ID NO:417; and the VH that specifically binds to Trop2 comprises a CDR1 comprising the amino acid sequence of SEQ ID NO:419; a CDR2 comprising the amino acid sequence of SEQ ID NO:420; and a CDR3 comprising the amino acid sequence of SEQ ID NO:421. In some aspects, the VL that specifically binds to Trop2 comprises a CDR1 comprising the amino acid sequence of SEQ ID NO: 441; a CDR2 comprising the amino acid sequence of SEQ ID NO:442 (YTS); and a CDR3 comprising the amino acid sequence of SEQ ID NO:443; and the VH that specifically binds to Trop2 comprises a CDR1 comprising the amino acid sequence of SEQ ID NO:429; a CDR2 comprising the amino acid sequence of SEQ ID NO:430; and a CDR3 comprising the amino acid sequence of SEQ ID NO:431. In some aspects, the VL that specifically binds to Trop2 comprises a CDR1 comprising the amino acid sequence of SEQ ID NO: 452; a CDR2 comprising the amino acid sequence of SEQ ID NO:453 (YTS); and a CDR3 comprising the amino acid sequence of SEQ ID NO:454; and the VH that specifically binds to Trop2 comprises a CDR1 comprising the amino acid sequence of SEQ ID NO:429; a CDR2 comprising the amino acid sequence of SEQ ID NO:430; and a CDR3 the amino acid sequence of SEQ ID NO: 431. In some aspects, the VL that specifically binds to Trop2 comprises a CDR1 comprising the amino acid sequence of SEQ ID NO: 462; a CDR2 comprising the amino acid sequence of SEQ ID NO:463 (YTS); and a CDR3 comprising the amino acid sequence of SEQ ID NO:464; and the VH that specifically binds to Trop2 comprises a CDR1 comprising the amino acid sequence of SEQ ID NO:429; a CDR2 comprising the amino acid sequence of SEQ ID NO:430; and a CDR3 comprising the amino acid sequence of SEQ ID NO:431. In some aspects, the VL that specifically binds to Trop2 comprises a CDR1 comprising the amino acid sequence of SEQ ID NO: 472; a CDR2 comprising the amino acid sequence of SEQ ID NO:473 (YTS); and a CDR3 comprising the amino acid sequence of SEQ ID NO:474; and the VH that specifically binds to Trop2 comprises a CDR1 comprising the amino acid sequence of SEQ ID NO:429; a CDR2 comprising the amino acid sequence of SEQ ID NO:430; and a CDR3 comprising the amino acid sequence of SEQ ID NO:431. In some aspects, the VL that specifically binds to Trop2 comprises a CDR1 comprising the amino acid sequence of SEQ ID NO: 655; a CDR2 comprising the amino acid sequence of SEQ ID NO:656; and a CDR3 the amino acid sequence of SEQ ID NO:657; and the VH that specifically binds to Trop2 comprises a CDR1 comprising the amino acid sequence of SEQ ID NO:659; a CDR2 comprising the amino acid sequence of SEQ ID NO:660; and a CDR3 comprising the amino acid sequence of SEQ ID NO:661. In some aspects, the VL that specifically binds to Trop2 comprises a CDR1 comprising the amino acid sequence of SEQ ID NO: 691; a CDR2 comprising the amino acid sequence of SEQ ID NO:692; and a CDR3 comprising the amino acid sequence of SEQ ID NO:693; and the VH that specifically binds to Trop2 comprises a CDR1 comprising the amino acid sequence of SEQ ID NO:695; a CDR2 comprising the amino acid sequence of SEQ ID NO:696; and a CDR3 comprising the amino acid sequence of SEQ ID NO:697. In some aspects, the VL that specifically binds to Trop2 comprises a CDR1 comprising the amino acid sequence of SEQ ID NO: 727; a CDR2 comprising the amino acid sequence of SEQ ID NO:728; and a CDR3 comprising the amino acid sequence of SEQ ID NO:729; and the VH that specifically binds to Trop2 comprises a CDR1 comprising the amino acid sequence of SEQ ID NO:731; a CDR2 comprising the amino acid sequence of SEQ ID NO:732; and a CDR3 comprising the amino acid sequence of SEQ ID NO:733. In some aspects, the VL that specifically binds to HER2 comprises a CDR1 comprising the amino acid sequence of SEQ ID NO: 393; a CDR2 comprising the amino acid sequence of SEQ ID NO:394; and a CDR3 comprising the amino acid sequence of SEQ ID NO:395; and the VH that specifically binds to HER2 comprises a CDR1 comprising the amino acid sequence of SEQ ID NO:397; a CDR2 comprising the amino acid sequence of SEQ ID NO:398; and a CDR3 comprising the amino acid sequence of SEQ ID NO:399. In some aspects, the VL that specifically binds to CD20 comprises a CDR1 comprising the amino acid sequence of SEQ ID NO: 486; a CDR2 comprising the amino acid sequence of SEQ ID NO:487 (AT); and a CDR3 comprising the amino acid sequence of SEQ ID NO:488; and the VH that specifically binds to CD20 comprises a CDR1 comprising the amino acid sequence of SEQ ID NO:508; a CDR2 comprising the amino acid sequence of SEQ ID NO:509; and a CDR3 comprising the amino acid sequence of SEQ ID NO:510. In some aspects, the VL that specifically binds to CD20 comprises a CDR1 comprising the amino acid sequence of SEQ ID NO: 504; a CDR2 comprising the amino acid sequence of SEQ ID NO:505 (AT); and a CDR3 comprising the amino acid sequence of SEQ ID NO:506; and the VH that specifically binds to CD20 comprises a CDR1 comprising the amino acid sequence of SEQ ID NO:508; a CDR2 comprising the amino acid sequence of SEQ ID NO:509; and a CDR3 comprising the amino acid sequence of SEQ ID NO:510. In some aspects, the VL that specifically binds to CD20 comprises a CDR1 comprising the amino acid sequence of SEQ ID NO: 536; a CDR2 comprising the amino acid sequence of SEQ ID NO:537; and a CDR3 comprising the amino acid sequence of SEQ ID NO:538; and the VH that specifically binds to CD20 comprises a CDR1 comprising the amino acid sequence of SEQ ID NO:540; a CDR2 comprising the amino acid sequence of SEQ ID NO:541; and a CDR3 comprising the amino acid sequence of SEQ ID NO:542. In some aspects, the VL that specifically binds to CD20 comprises a CDR1 comprising the amino acid sequence of SEQ ID NO: 548; a CDR2 comprising the amino acid sequence of SEQ ID NO:549; and a CDR3 comprising the amino acid sequence of SEQ ID NO:550; and the VH that specifically binds to CD20 comprises a CDR1 comprising the amino acid sequence of SEQ ID NO:552; a CDR2 comprising the amino acid sequence of SEQ ID NO:553; and a CDR3 comprising the amino acid sequence of SEQ ID NO:554. In some aspects, the VL that specifically binds to CD20 comprises a CDR1 comprising the amino acid sequence of SEQ ID NO: 753; a CDR2 comprising the amino acid sequence of SEQ ID NO:754; and a CDR3 comprising the amino acid sequence of SEQ ID NO:755; and the VH that specifically binds to CD20 comprises a CDR1 comprising the amino acid sequence of SEQ ID NO:757; a CDR2 comprising the amino acid sequence of SEQ ID NO:758; and a CDR3 comprising the amino acid sequence of SEQ ID NO:759. In some aspects, the VL that specifically binds to CD20 comprises a CDR1 comprising the amino acid sequence of SEQ ID NO: 789; a CDR2 comprising the amino acid sequence of SEQ ID NO:790; and a CDR3 comprising the amino acid sequence of SEQ ID NO:791; and the VH that specifically binds to CD20 comprises a CDR1 comprising the amino acid sequence of SEQ ID NO:793; a CDR2 comprising the amino acid sequence of SEQ ID NO:794; and a CDR3 comprising the amino acid sequence of SEQ ID NO:795. In some aspects, the VL that specifically binds to CD20 comprises a CDR1 comprising the amino acid sequence of SEQ ID NO: 825; a CDR2 comprising the amino acid sequence of SEQ ID NO:826; and a CDR3 comprising the amino acid sequence of SEQ ID NO:827; and the VH that specifically binds to CD20 comprises a CDR1 comprising the amino acid sequence of SEQ ID NO:829; a CDR2 comprising the amino acid sequence of SEQ ID NO:830; and a CDR3 comprising the amino acid sequence of SEQ ID NO:831. In some aspects, the VL that specifically binds to CD20 comprises a CDR1 comprising the amino acid sequence of SEQ ID NO: 871; a CDR2 comprising the amino acid sequence of SEQ ID NO:872; and a CDR3 comprising the amino acid sequence of SEQ ID NO:873. In some aspects, the VL that specifically binds to CD20 comprises a CDR1 comprising the amino acid sequence of SEQ ID NO: 879; a CDR2 comprising the amino acid sequence of SEQ ID NO:880; and a CDR3 comprising the amino acid sequence of SEQ ID NO:881; and the VH that specifically binds to CD20 comprises a CDR1 comprising the amino acid sequence of SEQ ID NO:875; a CDR2 comprising the amino acid sequence of SEQ ID NO:876; and a CDR3 comprising the amino acid sequence of SEQ ID NO:877. In some aspects, the VL that specifically binds to CD19 comprises a CDR1 comprising the amino acid sequence of SEQ ID NO: 490; a CDR2 comprising the amino acid sequence of SEQ ID NO:491 (AT); and a CDR3 comprising the amino acid sequence of SEQ ID NO:492; and the VH that specifically binds to CD19 comprises a CDR1 comprising the amino acid sequence of SEQ ID NO:500; a CDR2 comprising the amino acid sequence of SEQ ID NO:501; and a CDR3 comprising the amino acid sequence of SEQ ID NO:502. In some aspects, the VL that specifically binds to CD19 comprises a CDR1 comprising the amino acid sequence of SEQ ID NO: 496; a CDR2 comprising the amino acid sequence of SEQ ID NO:497 (AT); and a CDR3 comprising the amino acid sequence of SEQ ID NO:498; and the VH that specifically binds to CD19 comprises a CDR1 comprising the amino acid sequence of SEQ ID NO:500; a CDR2 comprising the amino acid sequence of SEQ ID NO:501; and a CDR3 comprising the amino acid sequence of SEQ ID NO:502. In some aspects, the VL that specifically binds to CD19 comprises a CDR1 comprising the amino acid sequence of SEQ ID NO: 745; a CDR2 comprising the amino acid sequence of SEQ ID NO: 746; and a CDR3 comprising the amino acid sequence of SEQ ID NO:747; and the VH that specifically binds to CD19 comprises a CDR1 comprising the amino acid sequence of SEQ ID NO:749; a CDR2 comprising the amino acid sequence of SEQ ID NO:750; and a CDR3 comprising the amino acid sequence of SEQ ID NO:751. In some aspects, the VL that specifically binds to CD19 comprises a CDR1 comprising the amino acid sequence of SEQ ID NO: 781; a CDR2 comprising the amino acid sequence of SEQ ID NO: 782; and a CDR3 comprising the amino acid sequence of SEQ ID NO:783; and the VH that specifically binds to CD19 comprises a CDR1 comprising the amino acid sequence of SEQ ID NO:785; a CDR2 comprising the amino acid sequence of SEQ ID NO:786; and a CDR3 the amino acid sequence of SEQ ID NO:787. In some aspects, the VL that specifically binds to CD19 comprises a CDR1 comprising the amino acid sequence of SEQ ID NO: 817; a CDR2 comprising the amino acid sequence of SEQ ID NO:818; and a CDR3 comprising the amino acid sequence of SEQ ID NO:819; and the VH that specifically binds to CD19 comprises a CDR1 comprising the amino acid sequence of SEQ ID NO:821; a CDR2 comprising the amino acid sequence of SEQ ID NO:822; and a CDR3 comprising the amino acid sequence of SEQ ID NO:823. In some aspects, the VL that specifically binds to CD28 comprises a CDR1 comprising the amino acid sequence of SEQ ID NO: 645; a CDR2 comprising the amino acid sequence of SEQ ID NO:646; and a CDR3 comprising the amino acid sequence of SEQ ID NO:647; and the VH that specifically binds to CD28 comprises a CDR1 comprising the amino acid sequence of SEQ ID NO:649; a CDR2 comprising the amino acid sequence of SEQ ID NO: 650; and a CDR3 comprising the amino acid sequence of SEQ ID NO:651. In some aspects, the VL that specifically binds to CD28 comprises a CDR1 comprising the amino acid sequence of SEQ ID NO: 681; a CDR2 comprising the amino acid sequence of SEQ ID NO:682; and a CDR3 comprising the amino acid sequence of SEQ ID NO:683; and the VH that specifically binds to CD28 comprises a CDR1 comprising the amino acid sequence of SEQ ID NO:685; a CDR2 comprising the amino acid sequence of SEQ ID NO:686; and a CDR3 comprising the amino acid sequence of SEQ ID NO:687. In some aspects, the VL that specifically binds to CD28 comprises a CDR1 comprising the amino acid sequence of SEQ ID NO: 771; a CDR2 comprising the amino acid sequence of SEQ ID NO:772; and a CDR3 comprising the amino acid sequence of SEQ ID NO:773; and the VH that specifically binds to CD28 comprises a CDR1 comprising the amino acid sequence of SEQ ID NO:775; a CDR2 comprising the amino acid sequence of SEQ ID NO:776; and a CDR3 comprising the amino acid sequence of SEQ ID NO:777. In some aspects, the VL that specifically binds to CD28 comprises a CDR1 comprising the amino acid sequence of SEQ ID NO: 843; a CDR2 comprising the amino acid sequence of SEQ ID NO:844; and a CDR3 comprising the amino acid sequence of SEQ ID NO:845; and the VH that specifically binds to CD28 comprises a CDR1 comprising the amino acid sequence of SEQ ID NO:847; a CDR2 comprising the amino acid sequence of SEQ ID NO:848; and a CDR3 comprising the amino acid sequence of SEQ ID NO:849. In some aspects, the VL that specifically binds to BCMA comprises a CDR1 comprising the amino acid sequence of SEQ ID NO: 621; a CDR2 comprising the amino acid sequence of SEQ ID NO:622; and a CDR3 comprising the amino acid sequence of SEQ ID NO:623; and the VH that specifically binds to BCMA comprises a CDR1 comprising the amino acid sequence of SEQ ID NO:625; a CDR2 comprising the amino acid sequence of SEQ ID NO:626; and a CDR3 comprising the amino acid sequence of SEQ ID NO:627. In some aspects, the VL that specifically binds to cMet comprises a CDR1 comprising the amino acid sequence of SEQ ID NO: 637; a CDR2 comprising the amino acid sequence of SEQ ID NO:638; and a CDR3 comprising the amino acid sequence of SEQ ID NO:639; and the VH that specifically binds to cMet comprises a CDR1 comprising the amino acid sequence of SEQ ID NO:641; a CDR2 comprising the amino acid sequence of SEQ ID NO:642; and a CDR3 comprising the amino acid sequence of SEQ ID NO:643. In some aspects, the VL that specifically binds to cMet comprises a CDR1 comprising the amino acid sequence of SEQ ID NO: 673; a CDR2 comprising the amino acid sequence of SEQ ID NO:674; and a CDR3 comprising the amino acid sequence of SEQ ID NO:675; and the VH that specifically binds to cMet comprises a CDR1 comprising the amino acid sequence of SEQ ID NO:677; a CDR2 comprising the amino acid sequence of SEQ ID NO:678; and a CDR3 comprising the amino acid sequence of SEQ ID NO:679. In some aspects, the VL that specifically binds to cMet comprises a CDR1 comprising the amino acid sequence of SEQ ID NO: 709; a CDR2 comprising the amino acid sequence of SEQ ID NO:710; and a CDR3 comprising the amino acid sequence of SEQ ID NO:711; and the VH that specifically binds to cMet comprises a CDR1 comprising the amino acid sequence of SEQ ID NO:713; a CDR2 comprising the amino acid sequence of SEQ ID NO:714; and a CDR3 comprising the amino acid sequence of SEQ ID NO:715.

[0144] In some aspects, the VL that specifically binds to the TAA comprises an amino acid sequence having at least 80%, at least 85%, at least 90%, at least 95%, or 100% identity to any one of SEQ ID NOs:71, 79, 87, 95, 103, 111, 119, 127, 135, 384, 404, 414, 440, 451, 461, 471, 583, 654, 690, 726, 392, 402, 485, 503, 535, 547, 752, 788, 824, 882, 870, 878, 489, 495, 543, 555, 744, 780, 816, 527, 644, 680, 770, 842, 620, 636, 672 and 708; and the VH that specifically binds to the TAA comprises an amino acid sequence having at least 80%, at least 85%, at least 90%, at least 95%, or 100% identity to any one of SEQ ID NOs:70, 78, 86, 94, 102, 110, 118, 126, 134, 388, 408, 418, 428, 584, 658, 694, 730, 396, 403, 507, 539, 551, 756, 792, 828, 883, 866, 874, 499, 544, 556, 748, 784, 820, 528, 648, 684, 774, 846, 624, 640, 676 and 712. In some aspects, the VL that specifically binds to CD38 comprises an amino acid sequence having at least 80% identity (such as at least 85%, 90%, 91%, 92%, 93%, 94%, 95%, 96%, 97%, 98%, 99% or 100% identity) to SEQ ID NO:71; and the VH that specifically binds to CD38 comprises an amino acid sequence having at least 80% identity (such as at least 85%, 90%, 91%, 92%, 93%, 94%, 95%, 96%, 97%, 98%, 99% or 100% identity) to SEQ ID NO:70. In some aspects, the VL that specifically binds to cMet comprises an amino acid sequence having at least 80% identity (such as at least 85%, 90%, 91%, 92%, 93%, 94%, 95%, 96%, 97%, 98%, 99% or 100% identity) to SEQ ID NO:79; and the VH that specifically binds to cMet comprises an amino acid sequence having at least 80% identity (such as at least 85%, 90%, 91%, 92%, 93%, 94%, 95%, 96%, 97%, 98%, 99% or 100% identity) to SEQ ID NO:78. In some aspects, the VL that specifically binds to Trop2 comprises an amino acid sequence having at least 80% identity (such as at least 85%, 90%, 91%, 92%, 93%, 94%, 95%, 96%, 97%, 98%, 99% or 100% identity) to SEQ ID NO:87; and the VH that specifically binds to Trop2 comprises an amino acid sequence having at least 80% identity (such as at least 85%, 90%, 91%, 92%, 93%, 94%, 95%, 96%, 97%, 98%, 99% or 100% identity) to SEQ ID NO:86. In some aspects, the VL that specifically binds to Trop2 comprises an amino acid sequence having at least 80% identity (such as at least 85%, 90%, 91%, 92%, 93%, 94%, 95%, 96%, 97%, 98%, 99% or 100% identity) to SEQ ID NO:95; and the VH that specifically binds to Trop2 comprises an amino acid sequence having at least 80% identity (such as at least 85%, 90%, 91%, 92%, 93%, 94%, 95%, 96%, 97%. 98%, 99% or 100% identity) to SEQ ID NO:94. In some aspects, the VL that specifically binds to CD3 comprises an amino acid sequence having at least 80% identity (such as at least 85%, 90%, 91%, 92%, 93%, 94%, 95%, 96%, 97%, 98%, 99% or 100% identity) to SEQ ID NO:103; and the VH that specifically binds to CD3 comprises an amino acid sequence having at least 80% identity (such as at least 85%, 90%, 91%, 92%, 93%, 94%, 95%, 96%, 97%, 98%, 99% or 100% identity) to SEQ ID NO:102. In some aspects, the VL that specifically binds to CD20 comprises an amino acid sequence having at least 80% identity (such as at least 85%, 90%, 91%, 92%, 93%, 94%, 95%, 96%, 97%, 98%, 99% or 100% identity) to SEQ ID NO:111; and the VH that specifically binds to CD20 comprises an amino acid sequence having at least 80% identity (such as at least 85%, 90%, 91%, 92%, 93%, 94%, 95%, 96%, 97%, 98%, 99% or 100% identity) to SEQ ID NO:110. In some aspects, the VL that specifically binds to CD20 comprises an amino acid sequence having at least 80% identity (such as at least 85%, 90%, 91%, 92%, 93%, 94%, 95%, 96%, 97%, 98%, 99% or 100% identity) to SEQ ID NO:119; and the VH that specifically binds to CD20 comprises an amino acid sequence having at least 80% identity (such as at least 85%, 90%, 91%, 92%, 93%, 94%, 95%, 96%, 97%, 98%, 99% or 100% identity) to SEQ ID NO:118. In some aspects, the VL that specifically binds to CD20 comprises an amino acid sequence having at least 80% identity (such as at least 85%, 90%, 91%, 92%, 93%, 94%, 95%, 96%, 97%, 98%, 99% or 100% identity) to SEQ ID NO:111; and the VH that specifically binds to CD20 comprises an amino acid sequence having at least 80% identity (such as at least 85%, 90%, 91%, 92%, 93%, 94%, 95%, 96%, 97%, 98%, 99% or 100% identity) to SEQ ID NO:118. In some aspects, the VL that specifically binds to CD20 comprises an amino acid sequence having at least 80% identity (such as at least 85%, 90%, 91%, 92%, 93%, 94%, 95%, 96%, 97%, 98%, 99% or 100% identity) to SEQ ID NO:119; and the VH that specifically binds to CD20 comprises an amino acid sequence having at least 80% identity (such as at least 85%, 90%, 91%, 92%, 93%, 94%, 95%, 96%, 97%, 98%, 99% or 100% identity) to SEQ ID NO:110. In some aspects, the VL that specifically binds to CD19 comprises an amino acid sequence having at least 80% identity (such as at least 85%, 90%, 91%, 92%, 93%, 94%, 95%, 96%, 97%, 98%, 99% or 100% identity) to SEQ ID NO:127; and the VH that specifically binds to CD19 comprises an amino acid sequence having at least 80% identity (such as at least 85%, 90%, 91%, 92%, 93%, 94%, 95%, 96%, 97%, 98%, 99% or 100% identity) to SEQ ID NO:126. In some aspects, the VL that specifically binds to CD19 comprises an amino acid sequence having at least 80% identity (such as at least 85%, 90%, 91%, 92%, 93%, 94%, 95%, 96%, 97%, 98%, 99% or 100% identity) to SEQ ID NO:135 or 882; and the VH that specifically binds to CD19 comprises an amino acid sequence having at least 80% identity (such as at least 85%, 90%, 91%, 92%, 93%, 94%, 95%, 96%, 97%, 98%, 99% or 100% identity) to SEQ ID NO:134 or 883. In some aspects, the VL that specifically binds to Trop2 comprises an amino acid sequence having at least 80% identity (such as at least 85%, 90%, 91%, 92%, 93%, 94%, 95%, 96%, 97%, 98%, 99% or 100% identity) to SEQ ID NO: 384; and the VH that specifically binds to Trop2 comprises an amino acid sequence having at least 80% identity (such as at least 85%, 90%, 91%, 92%, 93%, 94%, 95%, 96%, 97%, 98%, 99% or 100% identity) to SEQ ID NO: 388. In some aspects, the VL that specifically binds to Trop2 comprises an amino acid sequence having at least 80% identity (such as at least 85%, 90%, 91%, 92%, 93%, 94%, 95%, 96%, 97%, 98%, 99% or 100% identity) to SEQ ID NO: 404; and the VH that specifically binds to Trop2 comprises an amino acid sequence having at least 80% identity (such as at least 85%, 90%, 91%, 92%, 93%, 94%, 95%, 96%, 97%, 98%, 99% or 100% identity) to SEQ ID NO: 408. In some aspects, the VL that specifically binds to Trop2 comprises an amino acid sequence having at least 80% identity (such as at least 85%, 90%, 91%, 92%, 93%, 94%, 95%, 96%, 97%, 98%, 99% or 100% identity) to SEQ ID NO: 414; and the VH that specifically binds to Trop2 comprises an amino acid sequence having at least 80% identity (such as at least 85%, 90%, 91%, 92%, 93%, 94%, 95%, 96%, 97%, 98%, 99% or 100% identity) to SEQ ID NO: 418. In some aspects, the VL that specifically binds to Trop2 comprises an amino acid sequence having at least 80% identity (such as at least 85%, 90%, 91%, 92%, 93%, 94%, 95%, 96%, 97%, 98%, 99% or 100% identity) to SEQ ID NO: 440; and the VH that specifically binds to Trop2 comprises an amino acid sequence having at least 80% identity (such as at least 85%, 90%, 91%, 92%, 93%, 94%, 95%, 96%, 97%, 98%, 99% or 100% identity) to SEQ ID NO: 428. In some aspects, the VL that specifically binds to Trop2 comprises an amino acid sequence having at least 80% identity (such as at least 85%, 90%, 91%, 92%, 93%, 94%, 95%, 96%, 97%, 98%, 99% or 100% identity) to SEQ ID NO: 451; and the VH that specifically binds to Trop2 comprises an amino acid sequence having at least 80% identity (such as at least 85%, 90%, 91%, 92%, 93%, 94%, 95%, 96%, 97%, 98%, 99% or 100% identity) to SEQ ID NO: 428. In some aspects, the VL that specifically binds to Trop2 comprises an amino acid sequence having at least 80% identity (such as at least 85%, 90%, 91%, 92%, 93%, 94%, 95%, 96%, 97%, 98%, 99% or 100% identity) to SEQ ID NO: 461; and the VH that specifically binds to Trop2 comprises an amino acid sequence having at least 80% identity (such as at least 85%, 90%, 91%, 92%, 93%, 94%, 95%, 96%, 97%, 98%, 99% or 100% identity) to SEQ ID NO: 428. In some aspects, the VL that specifically binds to Trop2 comprises an amino acid sequence having at least 80% identity (such as at least 85%, 90%, 91%, 92%, 93%, 94%, 95%, 96%, 97%, 98%, 99% or 100% identity) to SEQ ID NO: 471; and the VH that specifically binds to Trop2 comprises an amino acid sequence having at least 80% identity (such as at least 85%, 90%, 91%, 92%, 93%, 94%, 95%, 96%, 97%, 98%, 99% or 100% identity) to SEQ ID NO: 428. In some aspects, the VL that specifically binds to Trop2 comprises an amino acid sequence having at least 80% identity (such as at least 85%, 90%, 91%, 92%, 93%, 94%, 95%, 96%, 97%, 98%, 99% or 100% identity) to SEQ ID NO: 583; and the VH that specifically binds to Trop2 comprises an amino acid sequence having at least 80% identity (such as at least 85%, 90%, 91%, 92%, 93%, 94%, 95%, 96%, 97%, 98%, 99% or 100% identity) to SEQ ID NO: 584. In some aspects, the VL that specifically binds to Trop2 comprises an amino acid sequence having at least 80% identity (such as at least 85%, 90%, 91%, 92%, 93%, 94%, 95%, 96%, 97%, 98%, 99% or 100% identity) to SEQ ID NO: 654; and the VH that specifically binds to Trop2 comprises an amino acid sequence having at least 80% identity (such as at least 85%, 90%, 91%, 92%, 93%, 94%, 95%, 96%, 97%, 98%, 99% or 100% identity) to SEQ ID NO: 658. In some aspects, the VL that specifically binds to Trop2 comprises an amino acid sequence having at least 80% identity (such as at least 85%, 90%, 91%, 92%, 93%, 94%, 95%, 96%, 97%, 98%, 99% or 100% identity) to SEQ ID NO: 690; and the VH that specifically binds to Trop2 comprises an amino acid sequence having at least 80% identity (such as at least 85%, 90%, 91%, 92%, 93%, 94%, 95%, 96%, 97%, 98%, 99% or 100% identity) to SEQ ID NO: 694. In some aspects, the VL that specifically binds to Trop2 comprises an amino acid sequence having at least 80% identity (such as at least 85%, 90%, 91%, 92%, 93%, 94%, 95%, 96%, 97%, 98%, 99% or 100% identity) to SEQ ID NO: 726; and the VH that specifically binds to Trop2 comprises an amino acid sequence having at least 80% identity (such as at least 85%, 90%, 91%, 92%, 93%, 94%, 95%, 96%, 97%, 98%, 99% or 100% identity) to SEQ ID NO: 730. In some aspects, the VL that specifically binds to CD20 comprises an amino acid sequence having at least 80% identity (such as at least 85%, 90%, 91%, 92%, 93%, 94%, 95%, 96%, 97%, 98%, 99% or 100% identity) to SEQ ID NO: 485; and the VH that specifically binds to CD20 comprises an amino acid sequence having at least 80% identity (such as at least 85%, 90%, 91%, 92%, 93%, 94%, 95%, 96%, 97%, 98%, 99% or 100% identity) to SEQ ID NO: 507. In some aspects, the VL that specifically binds to CD19 comprises an amino acid sequence having at least 80% identity (such as at least 85%, 90%, 91%, 92%, 93%, 94%, 95%, 96%, 97%, 98%, 99% or 100% identity) to SEQ ID NO: 489; and the VH that specifically binds to CD19 comprises an amino acid sequence having at least 80% identity (such as at least 85%, 90%, 91%, 92%, 93%, 94%, 95%, 96%, 97%, 98%, 99% or 100% identity) to SEQ ID NO: 499. In some aspects, the VL that specifically binds to HER2 comprises an amino acid sequence having at least 80% identity (such as at least 85%, 90%, 91%, 92%, 93%, 94%, 95%, 96%, 97%, 98%, 99% or 100% identity) to SEQ ID NO: 392; and the VH that specifically binds to HER2 comprises an amino acid sequence having at least 80% identity (such as at least 85%, 90%, 91%, 92%, 93%, 94%, 95%, 96%, 97%, 98%, 99% or 100% identity) to SEQ ID NO: 396. In some aspects, the VL that specifically binds to HER2 comprises an amino acid sequence having at least 80% identity (such as at least 85%, 90%, 91%, 92%, 93%, 94%, 95%, 96%, 97%, 98%, 99% or 100% identity) to SEQ ID NO: 402; and the VH that specifically binds to HER2 comprises an amino acid sequence having at least 80% identity (such as at least 85%, 90%, 91%, 92%, 93%, 94%, 95%, 96%, 97%, 98%, 99% or 100% identity) to SEQ ID NO: 403. In some aspects, the VL that specifically binds to CD20 comprises an amino acid sequence having at least 80% identity (such as at least 85%, 90%, 91%, 92%, 93%, 94%, 95%, 96%, 97%, 98%, 99% or 100% identity) to SEQ ID NO: 503; and the VH that specifically binds to CD20 comprises an amino acid sequence having at least 80% identity (such as at least 85%, 90%, 91%, 92%, 93%, 94%, 95%, 96%, 97%, 98%, 99% or 100% identity) to SEQ ID NO: 507. In some aspects, the VL that specifically binds to CD20 comprises an amino acid sequence having at least 80% identity (such as at least 85%, 90%, 91%, 92%, 93%, 94%, 95%, 96%, 97%, 98%, 99% or 100% identity) to SEQ ID NO: 535; and the VH that specifically binds to CD20 comprises an amino acid sequence having at least 80% identity (such as at least 85%, 90%, 91%, 92%, 93%, 94%, 95%, 96%, 97%, 98%, 99% or 100% identity) to SEQ ID NO: 539. In some aspects, the VL that specifically binds to CD20 comprises an amino acid sequence having at least 80% identity (such as at least 85%, 90%, 91%, 92%, 93%, 94%, 95%, 96%, 97%, 98%, 99% or 100% identity) to SEQ ID NO: 547; and the VH that specifically binds to CD20 comprises an amino acid sequence having at least 80% identity (such as at least 85%, 90%, 91%, 92%, 93%, 94%, 95%, 96%, 97%, 98%, 99% or 100% identity) to SEQ ID NO: 551. In some aspects, the VL that specifically binds to CD20 comprises an amino acid sequence having at least 80% identity (such as at least 85%, 90%, 91%, 92%, 93%, 94%, 95%, 96%, 97%, 98%, 99% or 100% identity) to SEQ ID NO: 752; and the VH that specifically binds to CD20 comprises an amino acid sequence having at least 80% identity (such as at least 85%, 90%, 91%, 92%, 93%, 94%, 95%, 96%, 97%, 98%, 99% or 100% identity) to SEQ ID NO: 756. In some aspects, the VL that specifically binds to CD20 comprises an amino acid sequence having at least 80% identity (such as at least 85%, 90%, 91%, 92%, 93%, 94%, 95%, 96%, 97%, 98%, 99% or 100% identity) to SEQ ID NO: 788; and the VH that specifically binds to CD20 comprises an amino acid sequence having at least 80% identity (such as at least 85%, 90%, 91%, 92%, 93%, 94%, 95%, 96%, 97%, 98%, 99% or 100% identity) to SEQ ID NO: 792. In some aspects, the VL that specifically binds to CD20 comprises an amino acid sequence having at least 80% identity (such as at least 85%, 90%, 91%, 92%, 93%, 94%, 95%, 96%, 97%, 98%, 99% or 100% identity) to SEQ ID NO: 824; and the VH that specifically binds to CD20 comprises an amino acid sequence having at least 80% identity (such as at least 85%, 90%, 91%, 92%, 93%, 94%, 95%, 96%, 97%, 98%, 99% or 100% identity) to SEQ ID NO: 828. In some aspects, the VL that specifically binds to CD20 comprises an amino acid sequence having at least 80% identity (such as at least 85%, 90%, 91%, 92%, 93%, 94%, 95%, 96%, 97%, 98%, 99% or 100% identity) to SEQ ID NO: 878; and the VH that specifically binds to CD20 comprises an amino acid sequence having at least 80% identity (such as at least 85%, 90%, 91%, 92%, 93%, 94%, 95%, 96%, 97%, 98%, 99% or 100% identity) to SEQ ID NO: 874. In some aspects, the VL that specifically binds to CD19 comprises an amino acid sequence having at least 80% identity (such as at least 85%, 90%, 91%, 92%, 93%, 94%, 95%, 96%, 97%, 98%, 99% or 100% identity) to SEQ ID NO: 495; and the VH that specifically binds to CD19 comprises an amino acid sequence having at least 80% identity (such as at least 85%, 90%, 91%, 92%, 93%, 94%, 95%, 96%, 97%, 98%, 99% or 100% identity) to SEQ ID NO: 499. In some aspects, the VL that specifically binds to CD19 comprises an amino acid sequence having at least 80% identity (such as at least 85%, 90%, 91%, 92%, 93%, 94%, 95%, 96%, 97%, 98%, 99% or 100% identity) to SEQ ID NO: 543; and the VH that specifically binds to CD19 comprises an amino acid sequence having at least 80% identity (such as at least 85%, 90%, 91%, 92%, 93%, 94%, 95%, 96%, 97%, 98%, 99% or 100% identity) to SEQ ID NO: 544. In some aspects, the VL that specifically binds to CD19 comprises an amino acid sequence having at least 80% identity (such as at least 85%, 90%, 91%, 92%, 93%, 94%, 95%, 96%, 97%, 98%, 99% or 100% identity) to SEQ ID NO: 555; and the VH that specifically binds to CD19 comprises an amino acid sequence having at least 80% identity (such as at least 85%, 90%, 91%, 92%, 93%, 94%, 95%, 96%, 97%, 98%, 99% or 100% identity) to SEQ ID NO: 556. In some aspects, the VL that specifically binds to CD19 comprises an amino acid sequence having at least 80% identity (such as at least 85%, 90%, 91%, 92%, 93%, 94%, 95%, 96%, 97%, 98%, 99% or 100% identity) to SEQ ID NO: 744; and the VH that specifically binds to CD19 comprises an amino acid sequence having at least 80% identity (such as at least 85%, 90%, 91%, 92%, 93%, 94%, 95%, 96%, 97%, 98%, 99% or 100% identity) to SEQ ID NO: 748. In some aspects, the VL that specifically binds to CD19 comprises an amino acid sequence having at least 80% identity (such as at least 85%, 90%, 91%, 92%, 93%, 94%, 95%, 96%, 97%, 98%, 99% or 100% identity) to SEQ ID NO: 780; and the VH that specifically binds to CD19 comprises an amino acid sequence having at least 80% identity (such as at least 85%, 90%, 91%, 92%, 93%, 94%, 95%, 96%, 97%, 98%, 99% or 100% identity) to SEQ ID NO: 784. In some aspects, the VL that specifically binds to CD19 comprises an amino acid sequence having at least 80% identity (such as at least 85%, 90%, 91%, 92%, 93%, 94%, 95%, 96%, 97%, 98%, 99% or 100% identity) to SEQ ID NO: 816; and the VH that specifically binds to CD19 comprises an amino acid sequence having at least 80% identity (such as at least 85%, 90%, 91%, 92%, 93%, 94%, 95%, 96%, 97%, 98%, 99% or 100% identity) to SEQ ID NO: 820. In some aspects, the VL that specifically binds to CD28 comprises an amino acid sequence having at least 80% identity (such as at least 85%, 90%, 91%, 92%, 93%, 94%, 95%, 96%, 97%, 98%, 99% or 100% identity) to SEQ ID NO: 527; and the VH that specifically binds to CD28 comprises an amino acid sequence having at least 80% identity (such as at least 85%, 90%, 91%, 92%, 93%, 94%, 95%, 96%, 97%, 98%, 99% or 100% identity) to SEQ ID NO: 528. In some aspects, the VL that specifically binds to CD28 comprises an amino acid sequence having at least 80% identity (such as at least 85%, 90%, 91%, 92%, 93%, 94%, 95%, 96%, 97%, 98%, 99% or 100% identity) to SEQ ID NO: 644; and the VH that specifically binds to CD28 comprises an amino acid sequence having at least 80% identity (such as at least 85%, 90%, 91%, 92%, 93%, 94%, 95%, 96%, 97%, 98%, 99% or 100% identity) to SEQ ID NO: 648. In some aspects, the VL that specifically binds to CD28 comprises an amino acid sequence having at least 80% identity (such as at least 85%, 90%, 91%, 92%, 93%, 94%, 95%, 96%, 97%, 98%, 99% or 100% identity) to SEQ ID NO: 680; and the VH that specifically binds to CD28 comprises an amino acid sequence having at least 80% identity (such as at least 85%, 90%, 91%, 92%, 93%, 94%, 95%, 96%, 97%, 98%, 99% or 100% identity) to SEQ ID NO: 684. In some aspects, the VL that specifically binds to CD28 comprises an amino acid sequence having at least 80% identity (such as at least 85%, 90%, 91%, 92%, 93%, 94%, 95%, 96%, 97%, 98%, 99% or 100% identity) to SEQ ID NO: 770; and the VH that specifically binds to CD28 comprises an amino acid sequence having at least 80% identity (such as at least 85%, 90%, 91%, 92%, 93%, 94%, 95%, 96%, 97%, 98%, 99% or 100% identity) to SEQ ID NO: 774. In some aspects, the VL that specifically binds to CD28 comprises an amino acid sequence having at least 80% identity (such as at least 85%, 90%, 91%, 92%, 93%, 94%, 95%, 96%, 97%, 98%, 99% or 100% identity) to SEQ ID NO: 842; and the VH that specifically binds to CD28 comprises an amino acid sequence having at least 80% identity (such as at least 85%, 90%, 91%, 92%, 93%, 94%, 95%, 96%, 97%, 98%, 99% or 100% identity) to SEQ ID NO: 846. In some aspects, the VL that specifically binds to BCMA comprises an amino acid sequence having at least 80% identity (such as at least 85%, 90%, 91%, 92%, 93%, 94%, 95%, 96%, 97%, 98%, 99% or 100% identity) to SEQ ID NO: 620; and the VH that specifically binds to BCMA comprises an amino acid sequence having at least 80% identity (such as at least 85%, 90%, 91%, 92%, 93%, 94%, 95%, 96%, 97%, 98%, 99% or 100% identity) to SEQ ID NO: 624. In some aspects, the VL that specifically binds to cMet comprises an amino acid sequence having at least 80% identity (such as at least 85%, 90%, 91%, 92%, 93%, 94%, 95%, 96%, 97%, 98%, 99% or 100% identity) to SEQ ID NO: 636; and the VH that specifically binds to cMet comprises an amino acid sequence having at least 80% identity (such as at least 85%, 90%, 91%, 92%, 93%, 94%, 95%, 96%, 97%, 98%, 99% or 100% identity) to SEQ ID NO: 640. In some aspects, the VL that specifically binds to cMet comprises an amino acid sequence having at least 80% identity (such as at least 85%, 90%, 91%, 92%, 93%, 94%, 95%, 96%, 97%, 98%, 99% or 100% identity) to SEQ ID NO: 672; and the VH that specifically binds to cMet comprises an amino acid sequence having at least 80% identity (such as at least 85%, 90%, 91%, 92%, 93%, 94%, 95%, 96%, 97%, 98%, 99% or 100% identity) to SEQ ID NO: 676. In some aspects, the VL that specifically binds to cMet comprises an amino acid sequence having at least 80% identity (such as at least 85%, 90%, 91%, 92%, 93%, 94%, 95%, 96%, 97%, 98%, 99% or 100% identity) to SEQ ID NO: 708; and the VH that specifically binds to cMet comprises an amino acid sequence having at least 80% identity (such as at least 85%, 90%, 91%, 92%, 93%, 94%, 95%, 96%, 97%, 98%, 99% or 100% identity) to SEQ ID NO: 712. In some aspects, the VL that specifically binds to CD20 comprises an amino acid sequence having at least 80% identity (such as at least 85%, 90%, 91%, 92%, 93%, 94%, 95%, 96%, 97%, 98%, 99% or 100% identity) to SEQ ID NO: 870 and the VH that specifically binds to CD20 comprises an amino acid sequence having at least 80% identity (such as at least 85%, 90%, 91%, 92%, 93%, 94%, 95%, 96%, 97%, 98%, 99% or 100% identity) to SEQ ID NO: 866. In some aspects, the VL that specifically binds to CD19 comprises an amino acid sequence having at least 80% identity (such as at least 85%, 90%, 91%, 92%, 93%, 94%, 95%, 96%, 97%, 98%, 99% or 100% identity) to DIQLTQSPASLAVSLGQRATISCKASQSVDYDGDSYLNWYQQIPGQPPKLLIYDASNLVS GIPPRFSGSGSGTDFTLNIHPVEKVDAATYHCQQSTEDPWTFGGGTKLEIK (SEQ ID NO: 882) and the VH that specifically binds to CD19 comprises an amino acid sequence having at least 80% identity (such as at least 85%, 90%, 91%, 92%, 93%, 94%, 95%, 96%, 97%, 98%, 99% or 100% identity) to

(SEQ ID NO: 883)
QVQLQQSGAELVRPGSSVKISCKASGYAFSSYWMNWV
KQRPGQGLEWIGQIWPGDGDTNYNGKFKGKATLTADE
SSSTAYMQLSSLASEDSAVYFCARRETTTVGRYYYAM
DYWGQGTTVTVSS.

[0145] In some aspects, the antigen binding polypeptide complex (e.g., antibody or antigen binding fragment thereof) of the invention specifically binds to CD3. In some aspects, the antigen binding polypeptide complex specifically binds to CD3 and one or more TAAs, such as, e.g., A2AR, APRIL, ATPDase, BAFF, BAFFR, BCMA, BlyS, BTK, BTLA, B7DC, B7H1, B7H2, B7H3, B7H4, B7H5, B7H6, B7H7, B7RP1, B7-4, C3, C5, CCL2, CCL3, CCL4, CCL5, CCL7, CCL8, CCL11, CCL15, CCL17, CCL19, CCL20, CCL21, CCL25, CCR3, CCR4, CD16A, CD19, CD20, CD24, CD27, CD28, CD30, CD38, CD39, CD40, CD40L, CD47, CD52, CD70, CD80, CD86, CD123, CD133, CD137, CD137L, CD160, CD272, CEACAM5, CLEC9, CLEC91, CRTH2, CSF-1, CSF-2, CSF-3, CXCL1, CXCL2, CXCL4, CXCL12, CXCL13, CXCR3, cMet, CTLA4, DLL3, DLL4, DNGR-1, E-cadherin, EGFR, ENTPD1, EpCAM, FCER1, FCER1A, FCER2, FGFR, FLAP, FOLH1, Gi24, GITR, GITRL, GPR5, GP100, GPRC5D, HER2, HER3, ICOSL, ICOS, HHLA2, HMGB1, HVEM, IDO, IFNa, IgE, IGF1R, IL2Rbeta, IL1, ILIA, IL1B, IL1F10, IL2, IL4, IL4Ra, IL5, IL5R, IL6, IL7, IL7Ra, IL8, IL9, IL9R, IL10, rhILlO, IL12, IL13, IL13Ra1, IL13Ra2, IL15, IL17, IL17Rb, IL18, IL22, IL23, IL25, IL7, IL33, IL35, ITGB4, ITK, KIR, LAG3, LAMP1, leptin, LPFS2, MHC class II, MUC-1, MUC-16, NCR3LG1, NKG2D, NKp46, NTPDase-1, OX40, OX40L, PD-1, PD-L1, PD-L2, PROM1, S152, SIRPalpha, SISP1, SLC, SPG64, ST2, STEAP1, STEAP2, Syk kinase, STEAP1, TROP2, TACI, TDO, TGFBETA, T14, TIGIT, TIM3, TLR, TLR2, TLR4, TLR5, TLR9, TMEF1, TNFa, TNFRSF7, Tp55, TREM1, TSLP, TSLPR, TWEAK, VEGF, VISTA, Vstm3, or WUCAM. For example, the antigen binding polypeptide complex may specifically bind CD3, CD19 and CD20. For example, the antigen binding polypeptide complex may specifically bind CD3, cMet and Trop2.

[0146] Antigen binding sequences (e.g., CDR, VH, VL, heavy chain and light chain sequences from antibodies) for A2AR, APRIL, ATPDase, BAFF, BAFFR, BCMA, BlyS, BTK, BTLA, B7DC, B7H1, B7H2, B7H3, B7H4, B7H5, B7H6, B7H7, B7RP1, B7-4, C3, C5, CCL2, CCL3, CCL4, CCL5, CCL7, CCL8, CCL11, CCL15, CCL17, CCL19, CCL20, CCL21, CCL25, CCR3, CCR4, CD16A, CD19, CD20, CD24, CD27, CD28, CD30, CD38, CD39, CD40, CD40L, CD47, CD52, CD70, CD80, CD86, CD123, CD133, CD137, CD137L, CD160, CD272, CEACAM5, CLEC9, CLEC91, CRTH2, CSF-1, CSF-2, CSF-3, CXCL1, CXCL2, CXCL4, CXCL12, CXCL13, CXCR3, cMet, CTLA4, DLL3, DLL4, DNGR-1, E-cadherin, EGFR, ENTPD1, EpCAM, FCER1, FCER1A, FCER2, FGFR, FLAP, FOLH1, Gi24, GITR, GITRL, GPR5, GP100, GPRC5D, HER2, HER3, ICOSL, ICOS, HHLA2, HMGB1, HVEM, IDO, IFNa, IgE, IGF1R, IL2Rbeta, IL1, ILIA, IL1B, IL1F10, IL2, IL4, IL4Ra, IL5, IL5R, IL6, IL7, IL7Ra, IL8, IL9, IL9R, IL10, rhILlO, IL12, IL13, IL13Ra1, IL13Ra2, IL15, IL17, IL17Rb, IL18, IL22, IL23, IL25, IL7, IL33, IL35, ITGB4, ITK, KIR, LAG3, LAMP1, leptin, LPFS2, MHC class II, MUC-1, MUC-16, NCR3LG1, NKG2D, NKp46, NTPDase-1, OX40, OX40L, PD-1, PD-L1, PD-L2, PROM1, S152, SIRPalpha, SISP1, SLC, SPG64, ST2, STEAP1, STEAP2, Syk kinase, STEAP1, TROP2, TACI, TDO, TGFBETA, T14, TIGIT, TIM3, TLR, TLR2, TLR4, TLR5, TLR9, TMEF1, TNFa, TNFRSF7, Tp55, TREM1, TSLP, TSLPR, TWEAK, VEGF, VISTA, Vstm3, or WUCAM are well known. For example, sequences for CD3, CD19, CD28, and CD38 are well known and include, but are not limited to, GenBank Accession Nos. AAA39272.1, AAA39159.1, ABN79462.1, AVW80143.1, AVW80142.1, AVW80141.1, AAB34430.1, AAB34429.1, CAD45042.1, 4CMH_C and 4CMH_B. Such sequences are also described, for example, in Wernly et al., Cells, 9(2):295, 2020; Arakawa et al., Journal of Biochemistry, 120(3):657-662, 1996; Cole et al., Transplantation, 68(4):563-571, 1999; Li et al., International Immunopharmacology, 62:299-308, 2018; Castella et al., Methods & Clinical Development, 12:134-144, 2019; Sun et al., Molecular Immunology, 41(9):929-938, 2004; Iwaszkiewicz-Grzes et al., Cytotherapy, 22(11):629-641, 2020, Rosinski et al., Transplant Direct, 1(2):e7, 2015; Ellis et al., J Immunology, 155(2):925-937, 1995; Stevenson et al., Blood, 77(5):1071-1079, 1991; Chillemi et al., Molecular Medicine, 19:99-108, 2013, and Int'l Pub. No. WO 2020/076853.

[0147] 47) In addition, molecular biology and recombinant DNA methods for making, screening and engineering antigen binding complexes and antibodies containing such sequences are well known and described, for example, in Adair et al. Human Antibodies, 5(1-2):41-47, 1994; Kostelny et al., J Immunol, 148(5):1547-1553 (1992), Shiraiwa et al., Methods, 154:10-20, 2019; and Zola, “Monoclonal Antibodies: A Manual of Techniques,” 1987, 1^{st} Ed., CRC Press; and Steinitz, Human Antibodies, 18(1-2):1-10, 2009.

[0148] In some aspects, a VL and a corresponding VH of the antigen binding polypeptide complex specifically bind to CD3. In some aspects, one VL and one corresponding VH of the antigen binding polypeptide complex specifically bind to CD3. In some aspects, VL3 and VH3 specifically bind to CD3. In some aspects, VL3 comprises a CDR1 comprising an amino acid sequence having at least 90% identity, at least 95% identity, or 100% identity to any one of SEQ ID NOs:35, 44, 99, 446, 456, 466, 476, 520, 663, 699, 735, 763, 799, 835, 855 and 863; a CDR2 comprising an amino acid sequence having at least 90% identity, at least 95% identity, or 100% identity to any one of SEQ ID NOs:36, 45, 100, 447 (DT), 457 (DT), 467 (DT), 477 (DT), 521, 664, 700, 736, 764, 800, 836, 856 and 864; and a CDR3 comprising an amino acid sequence having at least 90% identity, at least 95% identity, or 100% identity to any one of SEQ ID NOs:37, 46, 101, 448, 458, 468, 478, 522, 665, 701, 737, 765, 801, 837, 857 and 865; and VH3 comprises a CDR1 comprising an amino acid sequence having at least 90% identity, at least 95% identity, or 100% identity to any one of SEQ ID NOs:32, 40, 96, 433, 524, 667, 703, 739, 767, 803. 839, 851 and 859; a CDR2 comprising an amino acid sequence having at least 90% identity, at least 95% identity, or 100% identity to any one of SEQ ID NO:33, 41, 97, 434, 525, 668, 704, 740, 768, 804, 840, 852 and 860; and a CDR3 comprising an amino acid sequence having at least 90% identity, at least 95% identity, or 100% identity to any one of SEQ ID NOs:34, 42, 98, 435, 526, 669, 705, 741, 769, 805, 841, 853 and 861. In some aspects, VL3 comprises a CDR1 comprising an amino acid sequence having at least 90% identity to SEQ ID NO:35; a CDR2 comprising an amino acid sequence having at least 90% identity to SEQ ID NO:36; and a CDR3 comprising an amino acid sequence having at least 90% identity to SEQ ID NO:37; and VH3 comprises a CDR1 comprising an amino acid sequence having at least 90% identity to SEQ ID NO:32; a CDR2 comprising an amino acid sequence having at least 90% identity to SEQ ID NO:33; and a CDR3 comprising an amino acid sequence having at least 90% identity to SEQ ID NO:34. In some aspects, VL3 comprises a CDR1 comprising an amino acid sequence having at least 90% identity to SEQ ID NO:44; a CDR2 comprising an amino acid sequence having at least 90% identity to SEQ ID NO:45; and a CDR3 comprising an amino acid sequence having at least 90% identity to SEQ ID NO:46; and VH3 comprises a CDR1 comprising an amino acid sequence having at least 90% identity to SEQ ID NO:40; a CDR2 comprising an amino acid sequence having at least 90% identity to SEQ ID NO:41; and a CDR3 comprising an amino acid sequence having at least 90% identity to SEQ ID NO:42. In some aspects, VL3 comprises a CDR1 comprising an amino acid sequence having at least 90% identity to SEQ ID NO:446; a CDR2 comprising an amino acid sequence having at least 90% identity to SEQ ID NO:447 (DT); and a CDR3 comprising an amino acid sequence having at least 90% identity to SEQ ID NO:448; and VH3 comprises a CDR1 comprising an amino acid sequence having at least 90% identity to SEQ ID NO:433; a CDR2 comprising an amino acid sequence having at least 90% identity to SEQ ID NO:434; and a CDR3 comprising an amino acid sequence having at least 90% identity to SEQ ID NO:435. In some aspects, VL3 comprises a CDR1 comprising an amino acid sequence having at least 90% identity to SEQ ID NO:456; a CDR2 comprising an amino acid sequence having at least 90% identity to SEQ ID NO:457 (DT); and a CDR3 comprising an amino acid sequence having at least 90% identity to SEQ ID NO:458; and VH3 comprises a CDR1 comprising an amino acid sequence having at least 90% identity to SEQ ID NO:433; a CDR2 comprising an amino acid sequence having at least 90% identity to SEQ ID NO:434; and a CDR3 comprising an amino acid sequence having at least 90% identity to SEQ ID NO:435. In some aspects, VL3 comprises a CDR1 comprising an amino acid sequence having at least 90% identity to SEQ ID NO:466; a CDR2 comprising an amino acid sequence having at least 90% identity to SEQ ID NO:467 (DT); and a CDR3 comprising an amino acid sequence having at least 90% identity to SEQ ID NO:468; and VH3 comprises a CDR1 comprising an amino acid sequence having at least 90% identity to SEQ ID NO:433; a CDR2 comprising an amino acid sequence having at least 90% identity to SEQ ID NO:434; and a CDR3 comprising an amino acid sequence having at least 90% identity to SEQ ID NO:435. In some aspects, VL3 comprises a CDR1 comprising an amino acid sequence having at least 90% identity to SEQ ID NO:476; a CDR2 comprising an amino acid sequence having at least 90% identity to SEQ ID NO:477 (DT); and a CDR3 comprising an amino acid sequence having at least 90% identity to SEQ ID NO:478; and VH3 comprises a CDR1 comprising an amino acid sequence having at least 90% identity to SEQ ID NO:433; a CDR2 comprising an amino acid sequence having at least 90% identity to SEQ ID NO:434; and a CDR3 comprising an amino acid sequence having at least 90% identity to SEQ ID NO:435. In some aspects, VL3 comprises a CDR1 comprising an amino acid sequence having at least 90% identity to SEQ ID NO:520; a CDR2 comprising an amino acid sequence having at least 90% identity to SEQ ID NO:521; and a CDR3 comprising an amino acid sequence having at least 90% identity to SEQ ID NO:522; and VH3 comprises a CDR1 comprising an amino acid sequence having at least 90% identity to SEQ ID NO:524; a CDR2 comprising an amino acid sequence having at least 90% identity to SEQ ID NO:525; and a CDR3 comprising an amino acid sequence having at least 90% identity to SEQ ID NO:526. In some aspects, VL3 comprises a CDR1 comprising an amino acid sequence having at least 90% identity to SEQ ID NO:663; a CDR2 comprising an amino acid sequence having at least 90% identity to SEQ ID NO:664; and a CDR3 comprising an amino acid sequence having at least 90% identity to SEQ ID NO:665; and VH3 comprises a CDR1 comprising an amino acid sequence having at least 90% identity to SEQ ID NO:667; a CDR2 comprising an amino acid sequence having at least 90% identity to SEQ ID NO:668; and a CDR3 comprising an amino acid sequence having at least 90% identity to SEQ ID NO:669. In some aspects, VL3 comprises a CDR1 comprising an amino acid sequence having at least 90% identity to SEQ ID NO:699; a CDR2 comprising an amino acid sequence having at least 90% identity to SEQ ID NO: 700; and a CDR3 comprising an amino acid sequence having at least 90% identity to SEQ ID NO:701; and VH3 comprises a CDR1 comprising an amino acid sequence having at least 90% identity to SEQ ID NO:703; a CDR2 comprising an amino acid sequence having at least 90% identity to SEQ ID NO:704; and a CDR3 comprising an amino acid sequence having at least 90% identity to SEQ ID NO:705. In some aspects, VL3 comprises a CDR1 comprising an amino acid sequence having at least 90% identity to SEQ ID NO:735; a CDR2 comprising an amino acid sequence having at least 90% identity to SEQ ID NO:736; and a CDR3 comprising an amino acid sequence having at least 90% identity to SEQ ID NO:737 and VH3 comprises a CDR1 comprising an amino acid sequence having at least 90% identity to SEQ ID NO:739; a CDR2 comprising an amino acid sequence having at least 90% identity to SEQ ID NO:740; and a CDR3 comprising an amino acid sequence having at least 90% identity to SEQ ID NO:741. In some aspects, VL3 comprises a CDR1 comprising an amino acid sequence having at least 90% identity to SEQ ID NO:763; a CDR2 comprising an amino acid sequence having at least 90% identity to SEQ ID NO:764; and a CDR3 comprising an amino acid sequence having at least 90% identity to SEQ ID NO:765; and VH3 comprises a CDR1 comprising an amino acid sequence having at least 90% identity to SEQ ID NO:767; a CDR2 comprising an amino acid sequence having at least 90% identity to SEQ ID NO:768; and a CDR3 comprising an amino acid sequence having at least 90% identity to SEQ ID NO:769. In some aspects, VL3 comprises a CDR1 comprising an amino acid sequence having at least 90% identity to SEQ ID NO:799; a CDR2 comprising an amino acid sequence having at least 90% identity to SEQ ID NO:800; and a CDR3 comprising an amino acid sequence having at least 90% identity to SEQ ID NO:801; and VH3 comprises a CDR1 comprising an amino acid sequence having at least 90% identity to SEQ ID NO:803; a CDR2 comprising an amino acid sequence having at least 90% identity to SEQ ID NO:804; and a CDR3 comprising an amino acid sequence having at least 90% identity to SEQ ID NO:805. In some aspects, VL3 comprises a CDR1 comprising an amino acid sequence having at least 90% identity to SEQ ID NO:835; a CDR2 comprising an amino acid sequence having at least 90% identity to SEQ ID NO:836 and a CDR3 comprising an amino acid sequence having at least 90% identity to SEQ ID NO:837; and VH3 comprises a CDR1 comprising an amino acid sequence having at least 90% identity to SEQ ID NO:839; a CDR2 comprising an amino acid sequence having at least 90% identity to SEQ ID NO: 840; and a CDR3 comprising an amino acid sequence having at least 90% identity to SEQ ID NO:841. In some aspects, VL3 comprises a CDR1 comprising an amino acid sequence having at least 90% identity to SEQ ID NO:855; a CDR2 comprising an amino acid sequence having at least 90% identity to SEQ ID NO:856; and a CDR3 comprising an amino acid sequence having at least 90% identity to SEQ ID NO:857; and VH3 comprises a CDR1 comprising an amino acid sequence having at least 90% identity to SEQ ID NO:851; a CDR2 comprising an amino acid sequence having at least 90% identity to SEQ ID NO:852; and a CDR3 comprising an amino acid sequence having at least 90% identity to SEQ ID NO:853. In some aspects, VL3 comprises a CDR1 comprising an amino acid sequence having at least 90% identity to SEQ ID NO:863; a CDR2 comprising an amino acid sequence having at least 90% identity to SEQ ID NO: 864; and a CDR3 comprising an amino acid sequence having at least 90% identity to SEQ ID NO:865; and VH3 comprises a CDR1 comprising an amino acid sequence having at least 90% identity to SEQ ID NO:859 a CDR2 comprising an amino acid sequence having at least 90% identity to SEQ ID NO: 860; and a CDR3 comprising an amino acid sequence having at least 90% identity to SEQ ID NO:861. In some aspects, VL3 comprises a CDR1 comprising an amino acid sequence having at least 90% identity to SEQ ID NO:99; a CDR2 comprising an amino acid sequence having at least 90% identity to SEQ ID NO:100; and a CDR3 comprising an amino acid sequence having at least 90% identity to SEQ ID NO:100; and VH3 comprises a CDR1 comprising an amino acid sequence having at least 90% identity to SEQ ID NO:96 a CDR2 comprising an amino acid sequence having at least 90% identity to SEQ ID NO:97; and a CDR3 comprising an amino acid sequence having at least 90% identity to SEQ ID NO:98. As used herein, “at least 90% identity” includes at least 91%, 92%, 93%, 94%, 95%, 96%, 97%, 98%, 99% and 100% identity to the recited reference sequence. In some aspects, VL3 comprises a CDR1 comprising the amino acid sequence of SEQ ID NO:35; a CDR2 comprising the amino acid sequence of SEQ ID NO:36; and a CDR3 comprising the amino acid sequence of SEQ ID NO:37; and VH3 comprises a CDR1 comprising the amino acid sequence of SEQ ID NO:32; a CDR2 comprising the amino acid sequence of SEQ ID NO:33; and a CDR3 comprising the amino acid sequence of SEQ ID NO:34. In some aspects, VL3 comprises a CDR1 comprising the amino acid sequence of SEQ ID NO:44; a CDR2 comprising the amino acid sequence of SEQ ID NO:45; and a CDR3 comprising the amino acid sequence of SEQ ID NO:46; and VH3 comprises a CDR1 comprising the amino acid sequence of SEQ ID NO:40; a CDR2 comprising the amino acid sequence of SEQ ID NO:41; and a CDR3 comprising the amino acid sequence of SEQ ID NO:42. In some aspects, VL3 comprises a CDR1 comprising the amino acid sequence of SEQ ID NO:446; a CDR2 comprising the amino acid sequence of SEQ ID NO:447 (DT); and a CDR3 comprising the amino acid sequence of SEQ ID NO:448; and VH3 comprises a CDR1 comprising the amino acid sequence of SEQ ID NO:433; a CDR2 comprising the amino acid sequence of SEQ ID NO:434; and a CDR3 comprising the amino acid sequence of SEQ ID NO:435. In some aspects, VL3 comprises a CDR1 comprising the amino acid sequence of SEQ ID NO:456; a CDR2 comprising the amino acid sequence of SEQ ID NO:457 (DT); and a CDR3 comprising the amino acid sequence of SEQ ID NO:458; and VH3 comprises a CDR1 comprising the amino acid sequence of SEQ ID NO:433; a CDR2 comprising the amino acid sequence of SEQ ID NO:434; and a CDR3 comprising the amino acid sequence of SEQ ID NO:435. In some aspects, VL3 comprises a CDR1 comprising the amino acid sequence of SEQ ID NO:466; a CDR2 comprising the amino acid sequence of SEQ ID NO:467 (DT); and a CDR3 comprising the amino acid sequence of SEQ ID NO:468; and VH3 comprises a CDR1 comprising the amino acid sequence of SEQ ID NO:433; a CDR2 comprising the amino acid sequence of SEQ ID NO:434; and a CDR3 comprising the amino acid sequence of SEQ ID NO:435. In some aspects, VL3 comprises a CDR1 comprising the amino acid sequence of SEQ ID NO:476; a CDR2 comprising the amino acid sequence of SEQ ID NO:477 (DT); and a CDR3 comprising the amino acid sequence of SEQ ID NO:478; and VH3 comprises a CDR1 the amino acid sequence of SEQ ID NO:433; a CDR2 comprising the amino acid sequence of SEQ ID NO:434; and a CDR3 comprising the amino acid sequence of SEQ ID NO:435. In some aspects, VL3 comprises a CDR1 comprising the amino acid sequence of SEQ ID NO:520; a CDR2 comprising the amino acid sequence of SEQ ID NO:521; and a CDR3 comprising the amino acid sequence of SEQ ID NO:522; and VH3 comprises a CDR1 comprising the amino acid sequence of SEQ ID NO:524; a CDR2 comprising the amino acid sequence of SEQ ID NO:525; and a CDR3 comprising the amino acid sequence of SEQ ID NO:526. In some aspects, VL3 comprises a CDR1 comprising the amino acid sequence of SEQ ID NO:663; a CDR2 comprising the amino acid sequence of SEQ ID NO:664; and a CDR3 comprising the amino acid sequence of SEQ ID NO:665; and VH3 comprises a CDR1 comprising the amino acid sequence of SEQ ID NO:667; a CDR2 comprising the amino acid sequence of SEQ ID NO:668; and a CDR3 comprising the amino acid sequence of SEQ ID NO:669. In some aspects, VL3 comprises a CDR1 comprising the amino acid sequence of SEQ ID NO:699; a CDR2 comprising the amino acid sequence of SEQ ID NO: 700; and a CDR3 comprising the amino acid sequence of SEQ ID NO:701; and VH3 comprises a CDR1 comprising the amino acid sequence of SEQ ID NO:703; a CDR2 comprising the amino acid sequence of SEQ ID NO:704; and a CDR3 comprising the amino acid sequence of SEQ ID NO:705. In some aspects, VL3 comprises a CDR1 comprising the amino acid sequence of SEQ ID NO:735; a CDR2 comprising the amino acid sequence of SEQ ID NO:736; and a CDR3 comprising the amino acid sequence of SEQ ID NO:737 and VH3 comprises a CDR1 comprising the amino acid sequence of SEQ ID NO:739; a CDR2 comprising the amino acid sequence of SEQ ID NO:740; and a CDR3 comprising the amino acid sequence of SEQ ID NO:741. In some aspects, VL3 comprises a CDR1 comprising the amino acid sequence of SEQ ID NO:763; a CDR2 comprising the amino acid sequence of SEQ ID NO:764; and a CDR3 comprising the amino acid sequence of SEQ ID NO:765; and VH3 comprises a CDR1 comprising the amino acid sequence of SEQ ID NO:767; a CDR2 the amino acid sequence of SEQ ID NO:768; and a CDR3 comprising the amino acid sequence of SEQ ID NO:769. In some aspects, VL3 comprises a CDR1 comprising the amino acid sequence of SEQ ID NO:799; a CDR2 comprising the amino acid sequence of SEQ ID NO:800; and a CDR3 comprising the amino acid sequence of SEQ ID NO:801; and VH3 comprises a CDR1 comprising an amino acid sequence having at least 90% identity to SEQ ID NO:803; a CDR2 comprising the amino acid sequence of SEQ ID NO:804; and a CDR3 comprising the amino acid sequence of SEQ ID NO:805. In some aspects, VL3 comprises a CDR1 comprising the amino acid sequence of SEQ ID NO:835; a CDR2 comprising the amino acid sequence of SEQ ID NO:836 and a CDR3 comprising the amino acid sequence of SEQ ID NO:837; and VH3 comprises a CDR1 comprising the amino acid sequence of SEQ ID NO:839; a CDR2 comprising the amino acid sequence of SEQ ID NO:840; and a CDR3 comprising the amino acid sequence of SEQ ID NO:841. In some aspects, VL3 comprises a CDR1 comprising the amino acid sequence of SEQ ID NO:855; a CDR2 comprising the amino acid sequence of SEQ ID NO:856; and a CDR3 comprising the amino acid sequence of SEQ ID NO:857; and VH3 comprises a CDR1 comprising the amino acid sequence of SEQ ID NO:851; a CDR2 comprising the amino acid sequence of SEQ ID NO:852; and a CDR3 comprising the amino acid sequence of SEQ ID NO:853. In some aspects, VL3 comprises a CDR1 comprising the amino acid sequence of SEQ ID NO:863; a CDR2 comprising the amino acid sequence of SEQ ID NO: 864; and a CDR3 comprising the amino acid sequence of SEQ ID NO:865; and VH3 comprises a CDR1 comprising the amino acid sequence of SEQ ID NO:859 a CDR2 comprising the amino acid sequence of SEQ ID NO:860; and a CDR3 comprising the amino acid sequence of SEQ ID NO:861. In some aspects, VL3 comprises a CDR1 comprising the amino acid sequence of SEQ ID NO:99; a CDR2 comprising the amino acid sequence of SEQ ID NO:100; and a CDR3 comprising the amino acid sequence of SEQ ID NO:101; and VH3 comprises a CDR1 comprising the amino acid sequence of SEQ ID NO:96; a CDR2 comprising the amino acid sequence of SEQ ID NO:97; and a CDR3 comprising the amino acid sequence of SEQ ID NO:98. As used herein, “at least 90% identity” includes at least 91%, 92%, 93%, 94%, 95%, 96%, 97%, 98%, 99% and 100% identity to the recited reference sequence. In some aspects, VL3 comprises a CDR1 comprising the amino acid sequence of SEQ ID NO:35; a CDR2 comprising the amino acid sequence of SEQ ID NO:36; and a CDR3 comprising the amino acid sequence of SEQ ID NO:37; and VH3 comprises a CDR1 comprising the amino acid sequence of SEQ ID NO:32; a CDR2 comprising the amino acid sequence of SEQ ID NO:33; and a CDR3 comprising the amino acid sequence of SEQ ID NO:34. In some aspects, VL3 comprises a CDR1 comprising the amino acid sequence of SEQ ID NO:44; a CDR2 comprising the amino acid sequence of SEQ ID NO:45; and a CDR3 comprising the amino acid sequence of SEQ ID NO:46; and VH3 comprises a CDR1 comprising the amino acid sequence of SEQ ID NO:40; a CDR2 comprising the amino acid sequence of SEQ ID NO:41; and a CDR3 comprising the amino acid sequence of SEQ ID NO:42. In some aspects, VL3 comprises an amino acid sequence having at least 80%, at least 85%, at least 90%, at least 95%, or 100% identity to any one of SEQ ID NOs:39, 47, 103, 422, 445, 455, 465, 475, 519, 662, 698, 734, 762, 798, 834, 854 and 862; and/or VH3 comprises an amino acid sequence having at least 80%, at least 85%, at least 90%, at least 95%, or 100% identity to any one of SEQ ID NOs:38, 43, 102, 423, 432, 523, 666, 702, 738, 766, 802, 838, 850 and 858. In some aspects, VL3 comprises an amino acid sequence having at least 80% identity (such as at least 85%, 90%, 91%, 92%, 93%, 94%, 95%, 96%, 97%, 98%, 99% or 100% identity) to SEQ ID NO:39; and/or VH3 comprises an amino acid sequence having at least 80% identity (such as at least 85%, 90%, 91%, 92%, 93%, 94%, 95%, 96%, 97%, 98%, 99% or 100% identity) to SEQ ID NO:38. In some aspects, VL3 comprises an amino acid sequence having at least 80% identity (such as at least 85%, 90%, 91%, 92%, 93%, 94%, 95%, 96%, 97%, 98%, 99% or 100% identity) to SEQ ID NO:47; and/or VH3 comprises an amino acid sequence having at least 80% identity (such as at least 85%, 90%, 91%, 92%, 93%, 94%, 95%, 96%, 97%, 98%, 99% or 100% identity) to SEQ ID NO:43. In some aspects, VL3 comprises an amino acid sequence having at least 80% identity (such as at least 85%, 90%, 91%, 92%, 93%, 94%, 95%, 96%, 97%, 98%, 99% or 100% identity) to SEQ ID NO:39; and/or VH3 comprises an amino acid sequence having at least 80% identity (such as at least 85%, 90%, 91%, 92%, 93%, 94%, 95%, 96%, 97%, 98%, 99% or 100% identity) to SEQ ID NO:43. In some aspects, VL3 comprises an amino acid sequence having at least 80% identity (such as at least 85%, 90%, 91%, 92%, 93%, 94%, 95%, 96%, 97%, 98%, 99% or 100% identity) to SEQ ID NO:47; and/or VH3 comprises an amino acid sequence having at least 80% identity (such as at least 85%, 90%, 91%, 92%, 93%, 94%, 95%, 96%, 97%, 98%, 99% or 100% identity) to SEQ ID NO:38. In some aspects, VL3 comprises an amino acid sequence having at least 80% identity (such as at least 85%, 90%, 91%, 92%, 93%, 94%, 95%, 96%, 97%, 98%, 99% or 100% identity) to SEQ ID NO:422; and/or VH3 comprises an amino acid sequence having at least 80% identity (such as at least 85%, 90%, 91%, 92%, 93%, 94%, 95%, 96%, 97%, 98%, 99% or 100% identity) to SEQ ID NO:423. In some aspects, VL3 comprises an amino acid sequence having at least 80% identity (such as at least 85%, 90%, 91%, 92%, 93%, 94%, 95%, 96%, 97%, 98%, 99% or 100% identity) to SEQ ID NO:445; and/or VH3 comprises an amino acid sequence having at least 80% identity (such as at least 85%, 90%, 91%, 92%, 93%, 94%, 95%, 96%, 97%, 98%, 99% or 100% identity) to SEQ ID NO:432. In some aspects, VL3 comprises an amino acid sequence having at least 80% identity (such as at least 85%, 90%, 91%, 92%, 93%, 94%, 95%, 96%, 97%, 98%, 99% or 100% identity) to SEQ ID NO:455; and/or VH3 comprises an amino acid sequence having at least 80% identity (such as at least 85%, 90%, 91%, 92%, 93%, 94%, 95%, 96%, 97%, 98%, 99% or 100% identity) to SEQ ID NO:432. In some aspects, VL3 comprises an amino acid sequence having at least 80% identity (such as at least 85%, 90%, 91%, 92%, 93%, 94%, 95%, 96%, 97%, 98%, 99% or 100% identity) to SEQ ID NO:465; and/or VH3 comprises an amino acid sequence having at least 80% identity (such as at least 85%, 90%, 91%, 92%, 93%, 94%, 95%, 96%, 97%, 98%, 99% or 100% identity) to SEQ ID NO:432. In some aspects, VL3 comprises an amino acid sequence having at least 80% identity (such as at least 85%, 90%, 91%, 92%, 93%, 94%, 95%, 96%, 97%, 98%, 99% or 100% identity) to SEQ ID NO:475; and/or VH3 comprises an amino acid sequence having at least 80% identity (such as at least 85%, 90%, 91%, 92%, 93%, 94%, 95%, 96%, 97%, 98%, 99% or 100% identity) to SEQ ID NO:432. In some aspects, VL3 comprises an amino acid sequence having at least 80% identity (such as at least 85%, 90%, 91%, 92%, 93%, 94%, 95%, 96%, 97%, 98%, 99% or 100% identity) to SEQ ID NO:519; and/or VH3 comprises an amino acid sequence having at least 80% identity (such as at least 85%, 90%, 91%, 92%, 93%, 94%, 95%, 96%, 97%, 98%, 99% or 100% identity) to SEQ ID NO:523. In some aspects, VL3 comprises an amino acid sequence having at least 80% identity (such as at least 85%, 90%, 91%, 92%, 93%, 94%, 95%, 96%, 97%, 98%, 99% or 100% identity) to SEQ ID NO:662; and/or VH3 comprises an amino acid sequence having at least 80% identity (such as at least 85%, 90%, 91%, 92%, 93%, 94%, 95%, 96%, 97%, 98%, 99% or 100% identity) to SEQ ID NO:666. In some aspects, VL3 comprises an amino acid sequence having at least 80% identity (such as at least 85%, 90%, 91%, 92%, 93%, 94%, 95%, 96%, 97%, 98%, 99% or 100% identity) to SEQ ID NO:698; and/or VH3 comprises an amino acid sequence having at least 80% identity (such as at least 85%, 90%, 91%, 92%, 93%, 94%, 95%, 96%, 97%, 98%, 99% or 100% identity) to SEQ ID NO:702. In some aspects, VL3 comprises an amino acid sequence having at least 80% identity (such as at least 85%, 90%, 91%, 92%, 93%, 94%, 95%, 96%, 97%, 98%, 99% or 100% identity) to SEQ ID NO:734; and/or VH3 comprises an amino acid sequence having at least 80% identity (such as at least 85%, 90%, 91%, 92%, 93%, 94%, 95%, 96%, 97%, 98%, 99% or 100% identity) to SEQ ID NO:738. In some aspects, VL3 comprises an amino acid sequence having at least 80% identity (such as at least 85%, 90%, 91%, 92%, 93%, 94%, 95%, 96%, 97%, 98%, 99% or 100% identity) to SEQ ID NO:762; and/or VH3 comprises an amino acid sequence having at least 80% identity (such as at least 85%, 90%, 91%, 92%, 93%, 94%, 95%, 96%, 97%, 98%, 99% or 100% identity) to SEQ ID NO:766. In some aspects, VL3 comprises an amino acid sequence having at least 80% identity (such as at least 85%, 90%, 91%, 92%, 93%, 94%, 95%, 96%, 97%, 98%, 99% or 100% identity) to SEQ ID NO:798; and/or VH3 comprises an amino acid sequence having at least 80% identity (such as at least 85%, 90%, 91%, 92%, 93%, 94%, 95%, 96%, 97%, 98%, 99% or 100% identity) to SEQ ID NO:802. In some aspects, VL3 comprises an amino acid sequence having at least 80% identity (such as at least 85%, 90%, 91%, 92%, 93%, 94%, 95%, 96%, 97%, 98%, 99% or 100% identity) to SEQ ID NO:834; and/or VH3 comprises an amino acid sequence having at least 80% identity (such as at least 85%, 90%, 91%, 92%, 93%, 94%, 95%, 96%, 97%, 98%, 99% or 100% identity) to SEQ ID NO:838. In some aspects, VL3 comprises an amino acid sequence having at least 80% identity (such as at least 85%, 90%, 91%, 92%, 93%, 94%, 95%, 96%, 97%, 98%, 99% or 100% identity) to SEQ ID NO:854; and/or VH3 comprises an amino acid sequence having at least 80% identity (such as at least 85%, 90%, 91%, 92%, 93%, 94%, 95%, 96%, 97%, 98%, 99% or 100% identity) to SEQ ID NO:850. In some aspects, VL3 comprises an amino acid sequence having at least 80% identity (such as at least 85%, 90%, 91%, 92%, 93%, 94%, 95%, 96%, 97%, 98%, 99% or 100% identity) to SEQ ID NO:862; and/or VH3 comprises an amino acid sequence having at least 80% identity (such as at least 85%, 90%, 91%, 92%, 93%, 94%, 95%, 96%, 97%, 98%, 99% or 100% identity) to SEQ ID NO:858.

[0149] In some aspects, VL4 and VH4 specifically bind to CD3. In some aspects, VL4 comprises a CDR1 comprising an amino acid sequence having at least 90% identity, at least 95% identity, or 100% identity to any one of SEQ ID NOs:35, 44, 99, 446, 456, 466, 476, 520, 663, 699, 735, 763, 799, 835, 855 and 863; a CDR2 comprising an amino acid sequence having at least 90% identity, at least 95% identity, or 100% identity to any one of SEQ ID NOs:36, 45, 100, 447 (DT), 457 (DT), 467 (DT), 477 (DT), 521, 664, 700, 736, 764, 800, 836, 856 and 864; and a CDR3 comprising an amino acid sequence having at least 90% identity, at least 95% identity, or 100% identity to any one of SEQ ID NOs:37, 46, 101, 448, 458, 468, 478, 522, 665, 701, 737, 765, 801, 837, 857 and 865; and VH4 comprises a CDR1 comprising an amino acid sequence having at least 90% identity, at least 95% identity, or 100% identity to any one of SEQ ID NOs:32, 40, 96, 433, 524, 667, 703, 739, 767, 803. 839, 851 and 859; a CDR2 comprising an amino acid sequence having at least 90% identity, at least 95% identity, or 100% identity to any one of SEQ ID NOs:33, 41, 97, 434, 525, 668, 704, 740, 768, 804, 840, 852 and 860; and a CDR3 comprising an amino acid sequence having at least 90% identity, at least 95% identity, or 100% identity to any one of SEQ ID NOs:34, 42, 98, 435, 526, 669, 705, 741, 769, 805, 841, 853 and 861. In some aspects, VL4 comprises a CDR1 comprising an amino acid sequence having at least 90% identity to SEQ ID NO:35; a CDR2 comprising an amino acid sequence having at least 90% identity to SEQ ID NO:36; and a CDR3 comprising an amino acid sequence having at least 90% identity to SEQ ID NO:37; and VH4 comprises a CDR1 comprising an amino acid sequence having at least 90% identity to SEQ ID NO:32; a CDR2 comprising an amino acid sequence having at least 90% identity to SEQ ID NO:33; and a CDR3 comprising an amino acid sequence having at least 90% identity to SEQ ID NO:34. In some aspects, VL4 comprises a CDR1 comprising an amino acid sequence having at least 90% identity to SEQ ID NO:44; a CDR2 comprising an amino acid sequence having at least 90% identity to SEQ ID NO:45; and a CDR3 comprising an amino acid sequence having at least 90% identity to SEQ ID NO:46; and VH4 comprises a CDR1 comprising an amino acid sequence having at least 90% identity to SEQ ID NO:40; a CDR2 comprising an amino acid sequence having at least 90% identity to SEQ ID NO:41; and a CDR3 comprising an amino acid sequence having at least 90% identity to SEQ ID NO:42. In some aspects, VL4 comprises a CDR1 comprising an amino acid sequence having at least 90% identity to SEQ ID NO:446; a CDR2 comprising an amino acid sequence having at least 90% identity to SEQ ID NO:447 (DT); and a CDR3 comprising an amino acid sequence having at least 90% identity to SEQ ID NO:448; and VH4 comprises a CDR1 comprising an amino acid sequence having at least 90% identity to SEQ ID NO:433; a CDR2 comprising an amino acid sequence having at least 90% identity to SEQ ID NO:434; and a CDR3 comprising an amino acid sequence having at least 90% identity to SEQ ID NO:435. In some aspects, VL4 comprises a CDR1 comprising an amino acid sequence having at least 90% identity to SEQ ID NO:456; a CDR2 comprising an amino acid sequence having at least 90% identity to SEQ ID NO:457 (DT); and a CDR3 comprising an amino acid sequence having at least 90% identity to SEQ ID NO:458; and VH4 comprises a CDR1 comprising an amino acid sequence having at least 90% identity to SEQ ID NO:433; a CDR2 comprising an amino acid sequence having at least 90% identity to SEQ ID NO:434; and a CDR3 comprising an amino acid sequence having at least 90% identity to SEQ ID NO:435. In some aspects, VL4 comprises a CDR1 comprising an amino acid sequence having at least 90% identity to SEQ ID NO:466; a CDR2 comprising an amino acid sequence having at least 90% identity to SEQ ID NO:467 (DT); and a CDR3 comprising an amino acid sequence having at least 90% identity to SEQ ID NO:468; and VH4 comprises a CDR1 comprising an amino acid sequence having at least 90% identity to SEQ ID NO:433; a CDR2 comprising an amino acid sequence having at least 90% identity to SEQ ID NO:434; and a CDR3 comprising an amino acid sequence having at least 90% identity to SEQ ID NO:435. In some aspects, VL4 comprises a CDR1 comprising an amino acid sequence having at least 90% identity to SEQ ID NO:476; a CDR2 comprising an amino acid sequence having at least 90% identity to SEQ ID NO:477 (DT); and a CDR3 comprising an amino acid sequence having at least 90% identity to SEQ ID NO:478; and VH4 comprises a CDR1 comprising an amino acid sequence having at least 90% identity to SEQ ID NO:433; a CDR2 comprising an amino acid sequence having at least 90% identity to SEQ ID NO:434; and a CDR3 comprising an amino acid sequence having at least 90% identity to SEQ ID NO:435. In some aspects, VL4 comprises a CDR1 comprising an amino acid sequence having at least 90% identity to SEQ ID NO:520; a CDR2 comprising an amino acid sequence having at least 90% identity to SEQ ID NO:521; and a CDR3 comprising an amino acid sequence having at least 90% identity to SEQ ID NO:522; and VH4 comprises a CDR1 comprising an amino acid sequence having at least 90% identity to SEQ ID NO:524; a CDR2 comprising an amino acid sequence having at least 90% identity to SEQ ID NO:525; and a CDR3 comprising an amino acid sequence having at least 90% identity to SEQ ID NO:526. In some aspects, VL4 comprises a CDR1 comprising an amino acid sequence having at least 90% identity to SEQ ID NO:663; a CDR2 comprising an amino acid sequence having at least 90% identity to SEQ ID NO:664; and a CDR3 comprising an amino acid sequence having at least 90% identity to SEQ ID NO:665; and VH4 comprises a CDR1 comprising an amino acid sequence having at least 90% identity to SEQ ID NO:667; a CDR2 comprising an amino acid sequence having at least 90% identity to SEQ ID NO:668; and a CDR3 comprising an amino acid sequence having at least 90% identity to SEQ ID NO:669. In some aspects, VL4 comprises a CDR1 comprising an amino acid sequence having at least 90% identity to SEQ ID NO:699; a CDR2 comprising an amino acid sequence having at least 90% identity to SEQ ID NO: 700; and a CDR3 comprising an amino acid sequence having at least 90% identity to SEQ ID NO:701; and VH4 comprises a CDR1 comprising an amino acid sequence having at least 90% identity to SEQ ID NO:703; a CDR2 comprising an amino acid sequence having at least 90% identity to SEQ ID NO:704; and a CDR3 comprising an amino acid sequence having at least 90% identity to SEQ ID NO:705. In some aspects, VL4 comprises a CDR1 comprising an amino acid sequence having at least 90% identity to SEQ ID NO:735; a CDR2 comprising an amino acid sequence having at least 90% identity to SEQ ID NO:736; and a CDR3 comprising an amino acid sequence having at least 90% identity to SEQ ID NO:737 and VH4 comprises a CDR1 comprising an amino acid sequence having at least 90% identity to SEQ ID NO:739; a CDR2 comprising an amino acid sequence having at least 90% identity to SEQ ID NO:740; and a CDR3 comprising an amino acid sequence having at least 90% identity to SEQ ID NO:741. In some aspects, VL4 comprises a CDR1 comprising an amino acid sequence having at least 90% identity to SEQ ID NO:763; a CDR2 comprising an amino acid sequence having at least 90% identity to SEQ ID NO:764; and a CDR3 comprising an amino acid sequence having at least 90% identity to SEQ ID NO:765; and VH4 comprises a CDR1 comprising an amino acid sequence having at least 90% identity to SEQ ID NO:767; a CDR2 comprising an amino acid sequence having at least 90% identity to SEQ ID NO:768; and a CDR3 comprising an amino acid sequence having at least 90% identity to SEQ ID NO:769. In some aspects, VL4 comprises a CDR1 comprising an amino acid sequence having at least 90% identity to SEQ ID NO:799; a CDR2 comprising an amino acid sequence having at least 90% identity to SEQ ID NO:800; and a CDR3 comprising an amino acid sequence having at least 90% identity to SEQ ID NO:801; and VH4 comprises a CDR1 comprising an amino acid sequence having at least 90% identity to SEQ ID NO:803; a CDR2 comprising an amino acid sequence having at least 90% identity to SEQ ID NO: 804; and a CDR3 comprising an amino acid sequence having at least 90% identity to SEQ ID NO:805. In some aspects, VL4 comprises a CDR1 comprising an amino acid sequence having at least 90% identity to SEQ ID NO:835; a CDR2 comprising an amino acid sequence having at least 90% identity to SEQ ID NO:836 and a CDR3 comprising an amino acid sequence having at least 90% identity to SEQ ID NO:837; and VH4 comprises a CDR1 comprising an amino acid sequence having at least 90% identity to SEQ ID NO:839; a CDR2 comprising an amino acid sequence having at least 90% identity to SEQ ID NO:840; and a CDR3 comprising an amino acid sequence having at least 90% identity to SEQ ID NO:841. In some aspects, VL4 comprises a CDR1 comprising an amino acid sequence having at least 90% identity to SEQ ID NO:855; a CDR2 comprising an amino acid sequence having at least 90% identity to SEQ ID NO:856; and a CDR3 comprising an amino acid sequence having at least 90% identity to SEQ ID NO:857; and VH4 comprises a CDR1 comprising an amino acid sequence having at least 90% identity to SEQ ID NO:851; a CDR2 comprising an amino acid sequence having at least 90% identity to SEQ ID NO:852; and a CDR3 comprising an amino acid sequence having at least 90% identity to SEQ ID NO:853. In some aspects, VL4 comprises a CDR1 comprising an amino acid sequence having at least 90% identity to SEQ ID NO:863; a CDR2 comprising an amino acid sequence having at least 90% identity to SEQ ID NO: 864; and a CDR3 comprising an amino acid sequence having at least 90% identity to SEQ ID NO:865; and VH4 comprises a CDR1 comprising an amino acid sequence having at least 90% identity to SEQ ID NO:859 a CDR2 comprising an amino acid sequence having at least 90% identity to SEQ ID NO:860; and a CDR3 comprising an amino acid sequence having at least 90% identity to SEQ ID NO:861. In some aspects, VL4 comprises a CDR1 comprising an amino acid sequence having at least 90% identity to SEQ ID NO:99; a CDR2 comprising an amino acid sequence having at least 90% identity to SEQ ID NO:100; and a CDR3 comprising an amino acid sequence having at least 90% identity to SEQ ID NO:101; and VH4 comprises a CDR1 comprising an amino acid sequence having at least 90% identity to SEQ ID NO:96; a CDR2 comprising an amino acid sequence having at least 90% identity to SEQ ID NO:97; and a CDR3 comprising an amino acid sequence having at least 90% identity to SEQ ID NO:98. As used herein, “at least 90% identity” includes at least 91%, 92%, 93%, 94%, 95%, 96%, 97%, 98%, 99% and 100% identity to the recited reference sequence. In some aspects, VL4 comprises a CDR1 comprising the amino acid sequence of SEQ ID NO:35; a CDR2 comprising the amino acid sequence of SEQ ID NO:36; and a CDR3 comprising the amino acid sequence of SEQ ID NO:37; a″d VH4 comprises a CDR1 comprising the amino acid sequence of SEQ ID NO:32; a CDR2 comprising the amino acid sequence of SEQ ID NO:33; and a CDR3 comprising the amino acid sequence of SEQ ID NO:34. In some aspects, VL4 comprises a CDR1 comprising the amino acid sequence of SEQ ID NO:44; a CDR2 comprising the amino acid sequence of SEQ ID NO:45; and a CDR3 comprising the amino acid sequence of SEQ ID NO:46; and VH4 comprises a CDR1 comprising the amino acid sequence of SEQ ID NO:40; a CDR2 comprising the amino acid sequence of SEQ ID NO:41; and a CDR3 comprising the amino acid sequence of SEQ ID NO:42. In some aspects, VL4 comprises a CDR1 comprising the amino acid sequence of SEQ ID NO:446; a CDR2 comprising the amino acid sequence of SEQ ID NO:447 (DT); and a CDR3 comprising the amino acid sequence of SEQ ID NO:448; and VH4 comprises a CDR1 comprising the amino acid sequence of SEQ ID NO:433; a CDR2 comprising the amino acid sequence of SEQ ID NO:434; and a CDR3 comprising the amino acid sequence of SEQ ID NO:435. In some aspects, VL4 comprises a CDR1 comprising the amino acid sequence of SEQ ID NO:456; a CDR2 comprising the amino acid sequence of SEQ ID NO:457 (DT); and a CDR3 comprising the amino acid sequence of SEQ ID NO:458; and VH4 comprises a CDR1 comprising the amino acid sequence of SEQ ID NO:433; a CDR2 comprising the amino acid sequence of SEQ ID NO:434; and a CDR3 comprising the amino acid sequence of SEQ ID NO:435. In some aspects, VL4 comprises a CDR1 comprising the amino acid sequence of SEQ ID NO:466; a CDR2 comprising the amino acid sequence of SEQ ID NO:467 (DT); and a CDR3 comprising the amino acid sequence of SEQ ID NO:468; and VH4 comprises a CDR1 comprising the amino acid sequence of SEQ ID NO:433; a CDR2 comprising the amino acid sequence of SEQ ID NO:434; and a CDR3 comprising the amino acid sequence of SEQ ID NO:435. In some aspects, VL4 comprises a CDR1 comprising the amino acid sequence of SEQ ID NO:476; a CDR2 comprising the amino acid sequence of SEQ ID NO:477 (DT); and a CDR3 comprising the amino acid sequence of SEQ ID NO:478; and VH4 comprises a CDR1 the amino acid sequence of SEQ ID NO:433; a CDR2 comprising the amino acid sequence of SEQ ID NO:434; and a CDR3 comprising the amino acid sequence of SEQ ID NO:435. In some aspects, VL4 comprises a CDR1 comprising the amino acid sequence of SEQ ID NO:520; a CDR2 comprising the amino acid sequence of SEQ ID NO:521; and a CDR3 comprising the amino acid sequence of SEQ ID NO:522; and VH4 comprises a CDR1 comprising the amino acid sequence of SEQ ID NO:524; a CDR2 comprising the amino acid sequence of SEQ ID NO:525; and a CDR3 comprising the amino acid sequence of SEQ ID NO:526. In some aspects, VL4 comprises a CDR1 comprising the amino acid sequence of SEQ ID NO:663; a CDR2 comprising the amino acid sequence of SEQ ID NO:664; and a CDR3 comprising the amino acid sequence of SEQ ID NO:665; and VH4 comprises a CDR1 comprising the amino acid sequence of SEQ ID NO:667; a CDR2 comprising the amino acid sequence of SEQ ID NO:668; and a CDR3 comprising the amino acid sequence of SEQ ID NO:669. In some aspects, VL4 comprises a CDR1 comprising the amino acid sequence of SEQ ID NO:699; a CDR2 comprising the amino acid sequence of SEQ ID NO: 700; and a CDR3 comprising the amino acid sequence of SEQ ID NO:701; and VH4 comprises a CDR1 comprising the amino acid sequence of SEQ ID NO:703; a CDR2 comprising the amino acid sequence of SEQ ID NO:704; and a CDR3 comprising the amino acid sequence of SEQ ID NO:705. In some aspects, VL4 comprises a CDR1 comprising the amino acid sequence of SEQ ID NO:735; a CDR2 comprising the amino acid sequence of SEQ ID NO:736; and a CDR3 comprising the amino acid sequence of SEQ ID NO:737 and VH4 comprises a CDR1 comprising the amino acid sequence of SEQ ID NO:739; a CDR2 comprising the amino acid sequence of SEQ ID NO:740; and a CDR3 comprising the amino acid sequence of SEQ ID NO:741. In some aspects, VL4 comprises a CDR1 comprising the amino acid sequence of SEQ ID NO:763; a CDR2 comprising the amino acid sequence of SEQ ID NO:764; and a CDR3 comprising the amino acid sequence of SEQ ID NO:765; and VH4 comprises a CDR1 comprising the amino acid sequence of SEQ ID NO:767; a CDR2 the amino acid sequence of SEQ ID NO:768; and a CDR3 comprising the amino acid sequence of SEQ ID NO:769. In some aspects, VL4 comprises a CDR1 comprising the amino acid sequence of SEQ ID NO:799; a CDR2 comprising the amino acid sequence of SEQ ID NO:800; and a CDR3 comprising the amino acid sequence of SEQ ID NO:801; and VH4 comprises a CDR1 comprising an amino acid sequence having at least 90% identity to SEQ ID NO:803; a CDR2 comprising the amino acid sequence of SEQ ID NO:804; and a CDR3 comprising the amino acid sequence of SEQ ID NO:805. In some aspects, VL4 comprises a CDR1 comprising the amino acid sequence of SEQ ID NO:835; a CDR2 comprising the amino acid sequence of SEQ ID NO:836 and a CDR3 comprising the amino acid sequence of SEQ ID NO:837; and VH4 comprises a CDR1 comprising the amino acid sequence of SEQ ID NO:839; a CDR2 comprising the amino acid sequence of SEQ ID NO:840; and a CDR3 comprising the amino acid sequence of SEQ ID NO:841. In some aspects, VL4 comprises a CDR1 comprising the amino acid sequence of SEQ ID NO:855; a CDR2 comprising the amino acid sequence of SEQ ID NO:856; and a CDR3 comprising the amino acid sequence of SEQ ID NO:857; and VH4 comprises a CDR1 comprising the amino acid sequence of SEQ ID NO:851; a CDR2 comprising the amino acid sequence of SEQ ID NO:852; and a CDR3 comprising the amino acid sequence of SEQ ID NO:853. In some aspects, VL4 comprises a CDR1 comprising the amino acid sequence of SEQ ID NO:863; a CDR2 comprising the amino acid sequence of SEQ ID NO: 864; and a CDR3 comprising the amino acid sequence of SEQ ID NO:865; and VH4 comprises a CDR1 comprising the amino acid sequence of SEQ ID NO:859 a CDR2 comprising the amino acid sequence of SEQ ID NO:860; and a CDR3 comprising the amino acid sequence of SEQ ID NO:861. In some aspects, VL4 comprises a CDR1 comprising the amino acid sequence of SEQ ID NO:99; a CDR2 comprising the amino acid sequence of SEQ ID NO:100; and a CDR3 comprising the amino acid sequence of SEQ ID NO:101; and VH4 comprises a CDR1 comprising the amino acid sequence of SEQ ID NO:96; a CDR2 comprising the amino acid sequence of SEQ ID NO:97; and a CDR3 comprising the amino acid sequence of SEQ ID NO:98. In some aspects, VL4 comprises an amino acid sequence having at least 80%, at least 85%, at least 90%, at least 95%, or 100% identity to any one of SEQ ID NOs:39, 47, 103, 422, 445, 455, 465, 475, 519, 662, 698, 734, 762, 798, 834, 854 and 862; and VH4 comprises an amino acid sequence having at least 80%, at least 85%, at least 90%, at least 95%, or 100% identity to any one of SEQ ID NOs:38, 43, 102, 423, 432, 523, 666, 702, 738, 766, 802, 838, 850 and 858. In some aspects, VL4 comprises an amino acid sequence having at least 80% identity (such as at least 85%, 90%, 91%, 92%, 93%, 94%, 95%, 96%, 97%, 98%, 99% or 100% identity) to SEQ ID NO:39; and/or VH4 comprises an amino acid sequence having at least 80% identity (such as at least 85%, 90%, 91%, 92%, 93%, 94%, 95%, 96%, 97%, 98%, 99% or 100% identity) to SEQ ID NO:38. In some aspects, VL4 comprises an amino acid sequence having at least 80% identity (such as at least 85%, 90%, 91%, 92%, 93%, 94%, 95%, 96%, 97%, 98%, 99% or 100% identity) to SEQ ID NO:47; and/or VH4 comprises an amino acid sequence having at least 80% identity (such as at least 85%, 90%, 91%, 92%, 93%, 94%, 95%, 96%, 97%, 98%, 99% or 100% identity) to SEQ ID NO:43. n some aspects, VL4 comprises an amino acid sequence having at least 80% identity (such as at least 85%, 90%, 91%, 92%, 93%, 94%, 95%, 96%, 97%, 98%, 99% or 100% identity) to SEQ ID NO:39; and/or VH4 comprises an amino acid sequence having at least 80% identity (such as at least 85%, 90%, 91%, 92%, 93%, 94%, 95%, 96%, 97%, 98%, 99% or 100% identity) to SEQ ID NO:43. In some aspects, VL4 comprises an amino acid sequence having at least 80% identity (such as at least 85%, 90%, 91%, 92%, 93%, 94%, 95%, 96%, 97%, 98%, 99% or 100% identity) to SEQ ID NO:47; and/or VH4 comprises an amino acid sequence having at least 80% identity (such as at least 85%, 90%, 91%, 92%, 93%, 94%, 95%, 96%, 97%, 98%, 99% or 100% identity) to SEQ ID NO:38. In some aspects, VL4 comprises an amino acid sequence having at least 80% identity (such as at least 85%, 90%, 91%, 92%, 93%, 94%, 95%, 96%, 97%, 98%, 99% or 100% identity) to SEQ ID NO:422; and/or VH4 comprises an amino acid sequence having at least 80% identity (such as at least 85%, 90%, 91%, 92%, 93%, 94%, 95%, 96%, 97%, 98%, 99% or 100% identity) to SEQ ID NO:423. In some aspects, VL4 comprises an amino acid sequence having at least 80% identity (such as at least 85%, 90%, 91%, 92%, 93%, 94%, 95%, 96%, 97%, 98%, 99% or 100% identity) to SEQ ID NO:445; and/or VH4 comprises an amino acid sequence having at least 80% identity (such as at least 85%, 90%, 91%, 92%, 93%, 94%, 95%, 96%, 97%, 98%, 99% or 100% identity) to SEQ ID NO:432. In some aspects, VL4 comprises an amino acid sequence having at least 80% identity (such as at least 85%, 90%, 91%, 92%, 93%, 94%, 95%, 96%, 97%, 98%, 99% or 100% identity) to SEQ ID NO:455; and/or VH4 comprises an amino acid sequence having at least 80% identity (such as at least 85%, 90%, 91%, 92%, 93%. 94%. 95%. 96%, 97%. 98%, 99% or 100% identity) to SEQ ID NO:432. In some aspects, VL4 comprises an amino acid sequence having at least 80% identity (such as at least 85%, 90%, 91%, 92%, 93%, 94%, 95%, 96%, 97%, 98%, 99% or 100% identity) to SEQ ID NO:465; and/or VH4 comprises an amino acid sequence having at least 80% identity (such as at least 85%, 90%, 91%, 92%, 93%, 94%, 95%, 96%, 97%, 98%, 99% or 100% identity) to SEQ ID NO:432. In some aspects, VL4 comprises an amino acid sequence having at least 80% identity (such as at least 85%, 90%, 91%, 92%, 93%, 94%, 95%, 96%, 97%, 98%, 99% or 100% identity) to SEQ ID NO:475; and/or VH4 comprises an amino acid sequence having at least 80% identity (such as at least 85%, 90%, 91%, 92%, 93%, 94%, 95%, 96%, 97%, 98%, 99% or 100% identity) to SEQ ID NO:432. In some aspects, VL4 comprises an amino acid sequence having at least 80% identity (such as at least 85%, 90%, 91%, 92%, 93%, 94%, 95%, 96%, 97%, 98%, 99% or 100% identity) to SEQ ID NO:519; and/or VH4 comprises an amino acid sequence having at least 80% identity (such as at least 85%, 90%, 91%, 92%, 93%, 94%, 95%, 96%, 97%, 98%, 99% or 100% identity) to SEQ ID NO:523. In some aspects, VL4 comprises an amino acid sequence having at least 80% identity (such as at least 85%, 90%, 91%, 92%, 93%, 94%, 95%, 96%, 97%, 98%, 99% or 100% identity) to SEQ ID NO:662; and/or VH4 comprises an amino acid sequence having at least 80% identity (such as at least 85%, 90%, 91%, 92%, 93%, 94%, 95%, 96%, 97%, 98%, 99% or 100% identity) to SEQ ID NO:666. In some aspects, VL4 comprises an amino acid sequence having at least 80% identity (such as at least 85%, 90%, 91%, 92%, 93%, 94%, 95%, 96%, 97%, 98%, 99% or 100% identity) to SEQ ID NO:698; and/or VH4 comprises an amino acid sequence having at least 80% identity (such as at least 85%, 90%, 91%, 92%, 93%, 94%, 95%, 96%, 97%, 98%, 99% or 100% identity) to SEQ ID NO:702. In some aspects, VL4 comprises an amino acid sequence having at least 80% identity (such as at least 85%, 90%, 91%, 92%, 93%, 94%, 95%, 96%, 97%, 98%, 99% or 100% identity) to SEQ ID NO:734; and/or VH4 comprises an amino acid sequence having at least 80% identity (such as at least 85%, 90%, 91%, 92%, 93%, 94%, 95%, 96%, 97%, 98%, 99% or 100% identity) to SEQ ID NO:738. In some aspects, VL4 comprises an amino acid sequence having at least 80% identity (such as at least 85%, 90%, 91%, 92%, 93%, 94%, 95%, 96%, 97%, 98%, 99% or 100% identity) to SEQ ID NO:762; and/or VH4 comprises an amino acid sequence having at least 80% identity (such as at least 85%, 90%, 91%, 92%, 93%, 94%, 95%, 96%, 97%, 98%, 99% or 100% identity) to SEQ ID NO:766. In some aspects, VL4 comprises an amino acid sequence having at least 80% identity (such as at least 85%, 90%, 91%, 92%, 93%, 94%, 95%, 96%, 97%, 98%, 99% or 100% identity) to SEQ ID NO:798; and/or VH4 comprises an amino acid sequence having at least 80% identity (such as at least 85%, 90%, 91%, 92%, 93%, 94%, 95%, 96%, 97%, 98%, 99% or 100% identity) to SEQ ID NO:802. In some aspects, VL4 comprises an amino acid sequence having at least 80% identity (such as at least 85%, 90%, 91%, 92%, 93%, 94%, 95%, 96%, 97%, 98%, 99% or 100% identity) to SEQ ID NO:834; and/or VH4 comprises an amino acid sequence having at least 80% identity (such as at least 85%, 90%, 91%, 92%, 93%, 94%, 95%, 96%, 97%, 98%, 99% or 100% identity) to SEQ ID NO:838. In some aspects, VL4 comprises an amino acid sequence having at least 80% identity (such as at least 85%, 90%, 91%, 92%, 93%, 94%, 95%, 96%, 97%, 98%, 99% or 100% identity) to SEQ ID NO:854; and/or VH4 comprises an amino acid sequence having at least 80% identity (such as at least 85%, 90%, 91%, 92%, 93%, 94%, 95%, 96%, 97%, 98%, 99% or 100% identity) to SEQ ID NO:850. In some aspects, VL4 comprises an amino acid sequence having at least 80% identity (such as at least 85%, 90%, 91%, 92%, 93%, 94%, 95%, 96%, 97%, 98%, 99% or 100% identity) to SEQ ID NO:862; and/or VH4 comprises an amino acid sequence having at least 80% identity (such as at least 85%, 90%, 91%, 92%, 93%, 94%, 95%, 96%, 97%, 98%, 99% or 100% identity) to SEQ ID NO:858.

[0150] In some aspects, VL2 and VH2 specifically bind to CD3. In some aspects, VL2 comprises a CDR1 comprising an amino acid sequence having at least 90% identity, at least 95% identity, or 100% identity to any one of SEQ ID NOs:35, 44, 99, 446, 456, 466, 476, 520, 663, 699, 735, 763, 799, 835, 855 and 863; a CDR2 comprising an amino acid sequence having at least 90% identity, at least 95% identity, or 100% identity to any one of SEQ ID NOs:36, 45, 100, 447 (DT), 457 (DT), 467 (DT), 477 (DT), 521, 664, 700, 736, 764, 800, 836, 856 and 864; and a CDR3 comprising an amino acid sequence having at least 90% identity, at least 95% identity, or 100% identity to any one of SEQ ID NOs:37, 46, 101, 448, 458, 468, 478, 522, 665, 701, 737, 765, 801, 837, 857 and 865; and VH2 comprises a CDR1 comprising an amino acid sequence having at least 90% identity, at least 95% identity, or 100% identity to any one of SEQ ID NOs:32, 40, 96, 433, 524, 667, 703, 739, 767, 803. 839, 851 and 859; a CDR2 comprising an amino acid sequence having at least 90% identity, at least 95% identity, or 100% identity to any one of SEQ ID NOs:33, 41, 97, 434, 525, 668, 704, 740, 768, 804, 840, 852 and 860; and a CDR3 comprising an amino acid sequence having at least 90% identity, at least 95% identity, or 100% identity to any one of SEQ ID NOs:34, 42, 98, 435, 526, 669, 705, 741, 769, 805, 841, 853 and 861. In some aspects, VL2 comprises a CDR1 comprising an amino acid sequence having at least 90% identity to SEQ ID NO:35; a CDR2 comprising an amino acid sequence having at least 90% identity to SEQ ID NO:36; and a CDR3 comprising an amino acid sequence having at least 90% identity to SEQ ID NO:37; and VH2 comprises a CDR1 comprising an amino acid sequence having at least 90% identity to SEQ ID NO:32; a CDR2 comprising an amino acid sequence having at least 90% identity to SEQ ID NO:33; and a CDR3 comprising an amino acid sequence having at least 90% identity to SEQ ID NO:34. In some aspects, VL2 comprises a CDR1 comprising an amino acid sequence having at least 90% identity to SEQ ID NO:44; a CDR2 comprising an amino acid sequence having at least 90% identity to SEQ ID NO:45; and a CDR3 comprising an amino acid sequence having at least 90% identity to SEQ ID NO:46; and VH2 comprises a CDR1 comprising an amino acid sequence having at least 90% identity to SEQ ID NO:40; a CDR2 comprising an amino acid sequence having at least 90% identity to SEQ ID NO:41; and a CDR3 comprising an amino acid sequence having at least 90% identity to SEQ ID NO:42. In some aspects, VL2 comprises a CDR1 comprising an amino acid sequence having at least 90% identity to SEQ ID NO:446; a CDR2 comprising an amino acid sequence having at least 90% identity to SEQ ID NO:447 (DT); and a CDR3 comprising an amino acid sequence having at least 90% identity to SEQ ID NO:448; and VH2 comprises a CDR1 comprising an amino acid sequence having at least 90% identity to SEQ ID NO:433; a CDR2 comprising an amino acid sequence having at least 90% identity to SEQ ID NO:434; and a CDR3 comprising an amino acid sequence having at least 90% identity to SEQ ID NO:435. In some aspects, VL2 comprises a CDR1 comprising an amino acid sequence having at least 90% identity to SEQ ID NO:456; a CDR2 comprising an amino acid sequence having at least 90% identity to SEQ ID NO:457 (DT); and a CDR3 comprising an amino acid sequence having at least 90% identity to SEQ ID NO:458; and VH2 comprises a CDR1 comprising an amino acid sequence having at least 90% identity to SEQ ID NO:433; a CDR2 comprising an amino acid sequence having at least 90% identity to SEQ ID NO:434; and a CDR3 comprising an amino acid sequence having at least 90% identity to SEQ ID NO:435. In some aspects, VL2 comprises a CDR1 comprising an amino acid sequence having at least 90% identity to SEQ ID NO:466; a CDR2 comprising an amino acid sequence having at least 90% identity to SEQ ID NO:467 (DT); and a CDR3 comprising an amino acid sequence having at least 90% identity to SEQ ID NO:468; and VH2 comprises a CDR1 comprising an amino acid sequence having at least 90% identity to SEQ ID NO:433; a CDR2 comprising an amino acid sequence having at least 90% identity to SEQ ID NO:434; and a CDR3 comprising an amino acid sequence having at least 90% identity to SEQ ID NO:435. In some aspects, VL2 comprises a CDR1 comprising an amino acid sequence having at least 90% identity to SEQ ID NO:476; a CDR2 comprising an amino acid sequence having at least 90% identity to SEQ ID NO:477 (DT); and a CDR3 comprising an amino acid sequence having at least 90% identity to SEQ ID NO:478; and VH2 comprises a CDR1 comprising an amino acid sequence having at least 90% identity to SEQ ID NO:433; a CDR2 comprising an amino acid sequence having at least 90% identity to SEQ ID NO:434; and a CDR3 comprising an amino acid sequence having at least 90% identity to SEQ ID NO:435. In some aspects, VL2 comprises a CDR1 comprising an amino acid sequence having at least 90% identity to SEQ ID NO:520; a CDR2 comprising an amino acid sequence having at least 90% identity to SEQ ID NO:521; and a CDR3 comprising an amino acid sequence having at least 90% identity to SEQ ID NO:522; and VH2 comprises a CDR1 comprising an amino acid sequence having at least 90% identity to SEQ ID NO:524; a CDR2 comprising an amino acid sequence having at least 90% identity to SEQ ID NO:525; and a CDR3 comprising an amino acid sequence having at least 90% identity to SEQ ID NO:526. In some aspects, VL2 comprises a CDR1 comprising an amino acid sequence having at least 90% identity to SEQ ID NO:663; a CDR2 comprising an amino acid sequence having at least 90% identity to SEQ ID NO:664; and a CDR3 comprising an amino acid sequence having at least 90% identity to SEQ ID NO:665; and VH2 comprises a CDR1 comprising an amino acid sequence having at least 90% identity to SEQ ID NO:667; a CDR2 comprising an amino acid sequence having at least 90% identity to SEQ ID NO:668; and a CDR3 comprising an amino acid sequence having at least 90% identity to SEQ ID NO:669. In some aspects, VL2 comprises a CDR1 comprising an amino acid sequence having at least 90% identity to SEQ ID NO:699; a CDR2 comprising an amino acid sequence having at least 90% identity to SEQ ID NO: 700; and a CDR3 comprising an amino acid sequence having at least 90% identity to SEQ ID NO:701; and VH2 comprises a CDR1 comprising an amino acid sequence having at least 90% identity to SEQ ID NO:703; a CDR2 comprising an amino acid sequence having at least 90% identity to SEQ ID NO:704; and a CDR3 comprising an amino acid sequence having at least 90% identity to SEQ ID NO:705. In some aspects, VL2 comprises a CDR1 comprising an amino acid sequence having at least 90% identity to SEQ ID NO:735; a CDR2 comprising an amino acid sequence having at least 90% identity to SEQ ID NO:736; and a CDR3 comprising an amino acid sequence having at least 90% identity to SEQ ID NO:737 and VH2 comprises a CDR1 comprising an amino acid sequence having at least 90% identity to SEQ ID NO:739; a CDR2 comprising an amino acid sequence having at least 90% identity to SEQ ID NO:740; and a CDR3 comprising an amino acid sequence having at least 90% identity to SEQ ID NO:741. In some aspects, VL2 comprises a CDR1 comprising an amino acid sequence having at least 90% identity to SEQ ID NO:763; a CDR2 comprising an amino acid sequence having at least 90% identity to SEQ ID NO:764; and a CDR3 comprising an amino acid sequence having at least 90% identity to SEQ ID NO:765; and VH2 comprises a CDR1 comprising an amino acid sequence having at least 90% identity to SEQ ID NO:767; a CDR2 comprising an amino acid sequence having at least 90% identity to SEQ ID NO:768; and a CDR3 comprising an amino acid sequence having at least 90% identity to SEQ ID NO:769. In some aspects, VL2 comprises a CDR1 comprising an amino acid sequence having at least 90% identity to SEQ ID NO:799; a CDR2 comprising an amino acid sequence having at least 90% identity to SEQ ID NO:800; and a CDR3 comprising an amino acid sequence having at least 90% identity to SEQ ID NO:801; and VH2 comprises a CDR1 comprising an amino acid sequence having at least 90% identity to SEQ ID NO:803; a CDR2 comprising an amino acid sequence having at least 90% identity to SEQ ID NO: 804; and a CDR3 comprising an amino acid sequence having at least 90% identity to SEQ ID NO:805. In some aspects, VL2 comprises a CDR1 comprising an amino acid sequence having at least 90% identity to SEQ ID NO:835; a CDR2 comprising an amino acid sequence having at least 90% identity to SEQ ID NO:836 and a CDR3 comprising an amino acid sequence having at least 90% identity to SEQ ID NO:837; and VH2 comprises a CDR1 comprising an amino acid sequence having at least 90% identity to SEQ ID NO:839; a CDR2 comprising an amino acid sequence having at least 90% identity to SEQ ID NO:840; and a CDR3 comprising an amino acid sequence having at least 90% identity to SEQ ID NO:841. In some aspects, VL2 comprises a CDR1 comprising an amino acid sequence having at least 90% identity to SEQ ID NO:855; a CDR2 comprising an amino acid sequence having at least 90% identity to SEQ ID NO:856; and a CDR3 comprising an amino acid sequence having at least 90% identity to SEQ ID NO:857; and VH2 comprises a CDR1 comprising an amino acid sequence having at least 90% identity to SEQ ID NO:851; a CDR2 comprising an amino acid sequence having at least 90% identity to SEQ ID NO:852; and a CDR3 comprising an amino acid sequence having at least 90% identity to SEQ ID NO:853. In some aspects, VL2 comprises a CDR1 comprising an amino acid sequence having at least 90% identity to SEQ ID NO:863; a CDR2 comprising an amino acid sequence having at least 90% identity to SEQ ID NO: 864; and a CDR3 comprising an amino acid sequence having at least 90% identity to SEQ ID NO:865; and VH2 comprises a CDR1 comprising an amino acid sequence having at least 90% identity to SEQ ID NO:859 a CDR2 comprising an amino acid sequence having at least 90% identity to SEQ ID NO:860; and a CDR3 comprising an amino acid sequence having at least 90% identity to SEQ ID NO:861. In some aspects, VL2 comprises a CDR1 comprising an amino acid sequence having at least 90% identity to SEQ ID NO:99; a CDR2 comprising an amino acid sequence having at least 90% identity to SEQ ID NO:100; and a CDR3 comprising an amino acid sequence having at least 90% identity to SEQ ID NO:101; and VH2 comprises a CDR1 comprising an amino acid sequence having at least 90% identity to SEQ ID NO:96; a CDR2 comprising an amino acid sequence having at least 90% identity to SEQ ID NO:97; and a CDR3 comprising an amino acid sequence having at least 90% identity to SEQ ID NO: 98. As used herein, “at least 90% identity” includes at least 91%, 92%, 93%, 94%, 95%, 96%, 97%, 98%, 99% and 100% identity to the recited reference sequence. In some aspects, VL2 comprises a CDR1 comprising the amino acid sequence of SEQ ID NO:35; a CDR2 comprising the amino acid sequence of SEQ ID NO:36; and a CDR3 comprising the amino acid sequence of SEQ ID NO:37; a″d VH2 comprises a CDR1 comprising the amino acid sequence of SEQ ID NO:32; a CDR2 comprising the amino acid sequence of SEQ ID NO:33; and a CDR3 comprising the amino acid sequence of SEQ ID NO:34. In some aspects, VL2 comprises a CDR1 comprising the amino acid sequence of SEQ ID NO:44; a CDR2 comprising the amino acid sequence of SEQ ID NO:45; and a CDR3 comprising the amino acid sequence of SEQ ID NO:46; and VH2 comprises a CDR1 comprising the amino acid sequence of SEQ ID NO:40; a CDR2 comprising the amino acid sequence of SEQ ID NO:41; and a CDR3 comprising the amino acid sequence of SEQ ID NO:42. In some aspects, VL2 comprises a CDR1 comprising the amino acid sequence of SEQ ID NO:446; a CDR2 comprising the amino acid sequence of SEQ ID NO:447 (DT); and a CDR3 comprising the amino acid sequence of SEQ ID NO:448; and VH2 comprises a CDR1 comprising the amino acid sequence of SEQ ID NO:433; a CDR2 comprising the amino acid sequence of SEQ ID NO:434; and a CDR3 comprising the amino acid sequence of SEQ ID NO:435. In some aspects, VL2 comprises a CDR1 comprising the amino acid sequence of SEQ ID NO:456; a CDR2 comprising the amino acid sequence of SEQ ID NO:457 (DT); and a CDR3 comprising the amino acid sequence of SEQ ID NO:458; and VH2 comprises a CDR1 comprising the amino acid sequence of SEQ ID NO:433; a CDR2 comprising the amino acid sequence of SEQ ID NO:434; and a CDR3 comprising the amino acid sequence of SEQ ID NO:435. In some aspects, VL2 comprises a CDR1 comprising the amino acid sequence of SEQ ID NO:466; a CDR2 comprising the amino acid sequence of SEQ ID NO:467 (DT); and a CDR3 comprising the amino acid sequence of SEQ ID NO:468; and VH2 comprises a CDR1 comprising the amino acid sequence of SEQ ID NO:433; a CDR2 comprising the amino acid sequence of SEQ ID NO:434; and a CDR3 comprising the amino acid sequence of SEQ ID NO:435. In some aspects, VL2 comprises a CDR1 comprising the amino acid sequence of SEQ ID NO:476; a CDR2 comprising the amino acid sequence of SEQ ID NO:477 (DT); and a CDR3 comprising the amino acid sequence of SEQ ID NO:478; and VH2 comprises a CDR1 the amino acid sequence of SEQ ID NO:433; a CDR2 comprising the amino acid sequence of SEQ ID NO:434; and a CDR3 comprising the amino acid sequence of SEQ ID NO:435. In some aspects, VL2 comprises a CDR1 comprising the amino acid sequence of SEQ ID NO:520; a CDR2 comprising the amino acid sequence of SEQ ID NO:521; and a CDR3 comprising the amino acid sequence of SEQ ID NO:522; and VH2 comprises a CDR1 comprising the amino acid sequence of SEQ ID NO:524; a CDR2 comprising the amino acid sequence of SEQ ID NO:525; and a CDR3 comprising the amino acid sequence of SEQ ID NO:526. In some aspects, VL2 comprises a CDR1 comprising the amino acid sequence of SEQ ID NO:663; a CDR2 comprising the amino acid sequence of SEQ ID NO:664; and a CDR3 comprising the amino acid sequence of SEQ ID NO:665; and VH2 comprises a CDR1 comprising the amino acid sequence of SEQ ID NO:667; a CDR2 comprising the amino acid sequence of SEQ ID NO:668; and a CDR3 comprising the amino acid sequence of SEQ ID NO:669. In some aspects, VL2 comprises a CDR1 comprising the amino acid sequence of SEQ ID NO:699; a CDR2 comprising the amino acid sequence of SEQ ID NO: 700; and a CDR3 comprising the amino acid sequence of SEQ ID NO:701; and VH2 comprises a CDR1 comprising the amino acid sequence of SEQ ID NO:703; a CDR2 comprising the amino acid sequence of SEQ ID NO:704; and a CDR3 comprising the amino acid sequence of SEQ ID NO:705. In some aspects, VL2 comprises a CDR1 comprising the amino acid sequence of SEQ ID NO:735; a CDR2 comprising the amino acid sequence of SEQ ID NO:736; and a CDR3 comprising the amino acid sequence of SEQ ID NO:737 and VH2 comprises a CDR1 comprising the amino acid sequence of SEQ ID NO:739; a CDR2 comprising the amino acid sequence of SEQ ID NO:740; and a CDR3 comprising the amino acid sequence of SEQ ID NO:741. In some aspects, VL2 comprises a CDR1 comprising the amino acid sequence of SEQ ID NO:763; a CDR2 comprising the amino acid sequence of SEQ ID NO:764; and a CDR3 comprising the amino acid sequence of SEQ ID NO:765; and VH2 comprises a CDR1 comprising the amino acid sequence of SEQ ID NO:767; a CDR2 the amino acid sequence of SEQ ID NO:768; and a CDR3 comprising the amino acid sequence of SEQ ID NO:769. In some aspects, VL2 comprises a CDR1 comprising the amino acid sequence of SEQ ID NO:799; a CDR2 comprising the amino acid sequence of SEQ ID NO:800; and a CDR3 comprising the amino acid sequence of SEQ ID NO:801; and VH2 comprises a CDR1 comprising an amino acid sequence having at least 90% identity to SEQ ID NO:803; a CDR2 comprising the amino acid sequence of SEQ ID NO:804; and a CDR3 comprising the amino acid sequence of SEQ ID NO:805. In some aspects, VL2 comprises a CDR1 comprising the amino acid sequence of SEQ ID NO:835; a CDR2 comprising the amino acid sequence of SEQ ID NO:836 and a CDR3 comprising the amino acid sequence of SEQ ID NO:837; and VH2 comprises a CDR1 comprising the amino acid sequence of SEQ ID NO:839; a CDR2 comprising the amino acid sequence of SEQ ID NO:840; and a CDR3 comprising the amino acid sequence of SEQ ID NO:841. In some aspects, VL2 comprises a CDR1 comprising the amino acid sequence of SEQ ID NO:855; a CDR2 comprising the amino acid sequence of SEQ ID NO:856; and a CDR3 comprising the amino acid sequence of SEQ ID NO:857; and VH2 comprises a CDR1 comprising the amino acid sequence of SEQ ID NO:851; a CDR2 comprising the amino acid sequence of SEQ ID NO:852; and a CDR3 comprising the amino acid sequence of SEQ ID NO:853. In some aspects, VL2 comprises a CDR1 comprising the amino acid sequence of SEQ ID NO:863; a CDR2 comprising the amino acid sequence of SEQ ID NO: 864; and a CDR3 comprising the amino acid sequence of SEQ ID NO:865; and VH2 comprises a CDR1 comprising the amino acid sequence of SEQ ID NO:859 a CDR2 comprising the amino acid sequence of SEQ ID NO:860; and a CDR3 comprising the amino acid sequence of SEQ ID NO:861. In some aspects, VL2 comprises a CDR1 comprising the amino acid sequence of SEQ ID NO:99; a CDR2 comprising the amino acid sequence of SEQ ID NO:100; and a CDR3 comprising the amino acid sequence of SEQ ID NO:101; and VH2 comprises a CDR1 comprising the amino acid sequence of SEQ ID NO:96; a CDR2 comprising the amino acid sequence of SEQ ID NO:97; and a CDR3 comprising the amino acid sequence of SEQ ID NO:98. In some aspects, VL2 comprises an amino acid sequence having at least 80%, at least 85%, at least 90%, at least 95%, or 100% identity to any one of SEQ ID NOs:39, 47, 103, 422, 445, 455, 465, 475, 519, 662, 698, 734, 762, 798, 834, 854 and 862; and VH2 comprises an amino acid sequence having at least 80%, at least 85%, at least 90%, at least 95%, or 100% identity to any one of SEQ ID NOs:38, 43, 102. 423, 432, 523, 666, 702, 738, 766, 802, 838, 850 and 858. In some aspects, VL2 comprises an amino acid sequence having at least 80% identity (such as at least 85%, 90%, 91%, 92%, 93%, 94%, 95%, 96%, 97%, 98%, 99% or 100% identity) to SEQ ID NO:39; and/or VH2 comprises an amino acid sequence having at least 80% identity (such as at least 85%, 90%, 91%, 92%, 93%, 94%, 95%, 96%, 97%, 98%, 99% or 100% identity) to SEQ ID NO:38. In some aspects, VL2 comprises an amino acid sequence having at least 80% identity (such as at least 85%, 90%, 91%, 92%, 93%, 94%, 95%, 96%, 97%, 98%, 99% or 100% identity) to SEQ ID NO:47; and/or VH2 comprises an amino acid sequence having at least 80% identity (such as at least 85%, 90%, 91%, 92%, 93%, 94%, 95%, 96%, 97%. 98%, 99% or 100% identity) to SEQ ID NO:43. In some aspects, VL2 comprises an amino acid sequence having at least 80% identity (such as at least 85%, 90%, 91%, 92%, 93%, 94%, 95%, 96%, 97%, 98%, 99% or 100% identity) to SEQ ID NO:39; and/or VH2 comprises an amino acid sequence having at least 80% identity (such as at least 85%, 90%, 91%, 92%, 93%, 94%, 95%, 96%, 97%, 98%, 99% or 100% identity) to SEQ ID NO:43. In some aspects, VL2 comprises an amino acid sequence having at least 80% identity (such as at least 85%, 90%, 91%, 92%, 93%, 94%, 95%, 96%, 97%, 98%, 99% or 100% identity) to SEQ ID NO:47; and/or VH2 comprises an amino acid sequence having at least 80% identity (such as at least 85%, 90%, 91%, 92%, 93%, 94%, 95%, 96%, 97%, 98%, 99% or 100% identity) to SEQ ID NO:38. In some aspects, VL2 comprises an amino acid sequence having at least 80% identity (such as at least 85%, 90%, 91%, 92%, 93%, 94%, 95%, 96%, 97%, 98%, 99% or 100% identity) to SEQ ID NO:422; and/or VH2 comprises an amino acid sequence having at least 80% identity (such as at least 85%, 90%, 91%, 92%, 93%, 94%, 95%, 96%, 97%, 98%, 99% or 100% identity) to SEQ ID NO:423. In some aspects, VL2 comprises an amino acid sequence having at least 80% identity (such as at least 85%, 90%, 91%, 92%, 93%, 94%, 95%, 96%, 97%, 98%, 99% or 100% identity) to SEQ ID NO:445; and/or VH2 comprises an amino acid sequence having at least 80% identity (such as at least 85%, 90%, 91%, 92%, 93%, 94%, 95%, 96%, 97%, 98%, 99% or 100% identity) to SEQ ID NO:432. In some aspects, VL2 comprises an amino acid sequence having at least 80% identity (such as at least 85%, 90%, 91%, 92%, 93%, 94%, 95%, 96%, 97%, 98%, 99% or 100% identity) to SEQ ID NO:455; and/or VH2 comprises an amino acid sequence having at least 80% identity (such as at least 85%, 90%, 91%, 92%, 93%, 94%, 95%, 96%, 97%, 98%, 99% or 100% identity) to SEQ ID NO:432. In some aspects, VL2 comprises an amino acid sequence having at least 80% identity (such as at least 85%, 90%, 91%, 92%, 93%, 94%, 95%, 96%, 97%, 98%, 99% or 100% identity) to SEQ ID NO:465; and/or VH2 comprises an amino acid sequence having at least 80% identity (such as at least 85%, 90%, 91%, 92%, 93%, 94%, 95%, 96%, 97%, 98%, 99% or 100% identity) to SEQ ID NO:432. In some aspects, VL4 comprises an amino acid sequence having at least 80% identity (such as at least 85%, 90%, 91%, 92%, 93%, 94%, 95%, 96%, 97%, 98%, 99% or 100% identity) to SEQ ID NO:475; and/or VH2 comprises an amino acid sequence having at least 80% identity (such as at least 85%, 90%, 91%, 92%, 93%, 94%, 95%, 96%, 97%, 98%, 99% or 100% identity) to SEQ ID NO:432. In some aspects, VL2 comprises an amino acid sequence having at least 80% identity (such as at least 85%, 90%, 91%, 92%, 93%, 94%, 95%, 96%, 97%, 98%, 99% or 100% identity) to SEQ ID NO:519; and/or VH2 comprises an amino acid sequence having at least 80% identity (such as at least 85%, 90%, 91%, 92%, 93%, 94%, 95%, 96%, 97%, 98%, 99% or 100% identity) to SEQ ID NO:523. In some aspects, VL2 comprises an amino acid sequence having at least 80% identity (such as at least 85%, 90%, 91%, 92%, 93%, 94%, 95%, 96%, 97%, 98%, 99% or 100% identity) to SEQ ID NO:662; and/or VH2 comprises an amino acid sequence having at least 80% identity (such as at least 85%, 90%, 91%, 92%, 93%, 94%, 95%, 96%, 97%, 98%, 99% or 100% identity) to SEQ ID NO:666. In some aspects, VL2 comprises an amino acid sequence having at least 80% identity (such as at least 85%, 90%, 91%, 92%, 93%, 94%, 95%, 96%, 97%, 98%, 99% or 100% identity) to SEQ ID NO:698; and/or VH2 comprises an amino acid sequence having at least 80% identity (such as at least 85%, 90%, 91%, 92%, 93%, 94%, 95%, 96%, 97%, 98%, 99% or 100% identity) to SEQ ID NO:702. In some aspects, VL2 comprises an amino acid sequence having at least 80% identity (such as at least 85%, 90%, 91%, 92%, 93%, 94%, 95%, 96%, 97%, 98%, 99% or 100% identity) to SEQ ID NO:734; and/or VH2 comprises an amino acid sequence having at least 80% identity (such as at least 85%, 90%, 91%, 92%, 93%, 94%, 95%, 96%, 97%, 98%, 99% or 100% identity) to SEQ ID NO:738. In some aspects, VL2 comprises an amino acid sequence having at least 80% identity (such as at least 85%, 90%, 91%, 92%, 93%, 94%, 95%, 96%, 97%, 98%, 99% or 100% identity) to SEQ ID NO:762; and/or VH2 comprises an amino acid sequence having at least 80% identity (such as at least 85%, 90%, 91%, 92%, 93%, 94%, 95%, 96%, 97%, 98%, 99% or 100% identity) to SEQ ID NO:766. In some aspects, VL2 comprises an amino acid sequence having at least 80% identity (such as at least 85%, 90%, 91%, 92%, 93%, 94%, 95%, 96%, 97%, 98%, 99% or 100% identity) to SEQ ID NO:798; and/or VH2 comprises an amino acid sequence having at least 80% identity (such as at least 85%, 90%, 91%, 92%, 93%, 94%, 95%, 96%, 97%, 98%, 99% or 100% identity) to SEQ ID NO:802. In some aspects, VL2 comprises an amino acid sequence having at least 80% identity (such as at least 85%, 90%, 91%, 92%, 93%, 94%, 95%, 96%, 97%, 98%, 99% or 100% identity) to SEQ ID NO:834; and/or VH2 comprises an amino acid sequence having at least 80% identity (such as at least 85%, 90%, 91%, 92%, 93%, 94%, 95%, 96%, 97%, 98%, 99% or 100% identity) to SEQ ID NO:838. In some aspects, VL2 comprises an amino acid sequence having at least 80% identity (such as at least 85%, 90%, 91%, 92%, 93%, 94%, 95%, 96%, 97%, 98%, 99% or 100% identity) to SEQ ID NO:854; and/or VH2 comprises an amino acid sequence having at least 80% identity (such as at least 85%, 90%, 91%, 92%, 93%, 94%, 95%, 96%, 97%, 98%, 99% or 100% identity) to SEQ ID NO:850. In some aspects, VL2 comprises an amino acid sequence having at least 80% identity (such as at least 85%, 90%, 91%, 92%, 93%, 94%, 95%, 96%, 97%, 98%, 99% or 100% identity) to SEQ ID NO:862; and/or VH2 comprises an amino acid sequence having at least 80% identity (such as at least 85%, 90%, 91%, 92%, 93%, 94%, 95%, 96%, 97%, 98%, 99% or 100% identity) to SEQ ID NO:858.

[0151] In some aspects, the antigen binding polypeptide complex (e.g., antibody or antigen binding fragment thereof) of the invention specifically binds to an immune stimulating receptor. In some aspects, the antigen binding polypeptide complex specifically binds to CD3 and an immune stimulating receptor. In some aspects, the antigen binding polypeptide complex specifically binds to CD3, an immune stimulating receptor, and one or more TAAs, such as, e.g., A2AR, APRIL, ATPDase, BAFF, BAFFR, BCMA, BlyS, BTK, BTLA, B7DC, B7H1, B7H2, B7H3, B7H4, B7H5, B7H6, B7H7, B7RP1, B7-4, C3, C5, CCL2, CCL3, CCL4, CCL5, CCL7, CCL8, CCL11, CCL15, CCL17, CCL19, CCL20, CCL21, CCL25, CCR3, CCR4, CD16A, CD19, CD20, CD24, CD27, CD28, CD30, CD38, CD39, CD40, CD40L, CD47, CD52, CD70, CD80, CD86, CD123, CD133, CD137, CD137L, CD160, CD272, CEACAM5, CLEC9, CLEC91, CRTH2, CSF-1, CSF-2, CSF-3, CXCL1, CXCL2, CXCL4, CXCL12, CXCL13, CXCR3, cMet, CTLA4, DLL3, DLL4, DNGR-1, E-cadherin, EGFR, ENTPD1, EpCAM, FCER1, FCER1A, FCER2, FGFR, FLAP, FOLH1, Gi24, GITR, GITRL, GPR5, GP100, GPRC5D, HER2, HER3, ICOSL, ICOS, HHLA2, HMGB1, HVEM, IDO, IFNa, IgE, IGF1R, IL2Rbeta, IL1, ILIA, IL1B, IL1F10, IL2, IL4, IL4Ra, IL5, IL5R, IL6, IL7, IL7Ra, IL8, IL9, IL9R, IL10, rhILlO, IL12, IL13, IL13Ra1, IL13Ra2, IL15, IL17, IL17Rb, IL18, IL22, IL23, IL25, IL7, IL33, IL35, ITGB4, ITK, KIR, LAG3, LAMP1, leptin, LPFS2, MHC class II, MUC-1, MUC-16, NCR3LG1, NKG2D, NKp46, NTPDase-1, OX40, OX40L, PD-1, PD-L1, PD-L2, PROM1, S152, SIRPalpha, SISP1, SLC, SPG64, ST2, STEAP1, STEAP2, Syk kinase, STEAP1, TROP2, TACI, TDO, TGFBETA, T14, TIGIT, TIM3, TLR, TLR2, TLR4, TLR5, TLR9, TMEF1, TNFa, TNFRSF7, Tp55, TREM1, TSLP, TSLPR, TWEAK, VEGF, VISTA, Vstm3, or WUCAM. For example, the antigen binding polypeptide complex may specifically bind CD3, an immune stimulating receptor (such as CD28), CD19 and CD20. For example, the antigen binding polypeptide complex may specifically bind CD3, an immune stimulating receptor (such as CD28), cMet and Trop2.

[0152] In some aspects, a VL and a corresponding VH of the antigen binding polypeptide complex specifically bind to an immune stimulating receptor (such as CD28). In some aspects, one VL and one corresponding VH of the antigen binding polypeptide complex specifically bind to an immune stimulating receptor. In some aspects, VL1 and VH1 specifically bind to an immune stimulating receptor. In some aspects, VL1 comprises a CDR1 comprising an amino acid sequence having at least 90% identity, at least 95% identity, or 100% identity to any one of SEQ ID NOs:51, 59, 645, 681, 771, 843, 717 and 807; a CDR2 comprising an amino acid sequence having at least 90% identity, at least 95% identity, or 100% identity to any one of SEQ ID NOs:52, 60, 646, 682, 772, 844, 718 and 808; and a CDR3 comprising an amino acid sequence having at least 90% identity, at least 95% identity, or 100% identity to any one of SEQ ID NOs:53, 61, 647, 683, 773, 845, 719 and 809; and VH1 comprises a CDR1 comprising an amino acid sequence having at least 90% identity, at least 95% identity, or 100% identity to any one of SEQ ID NOs:48, 56, 649, 685, 775, 847, 721 and 811; a CDR2 comprising an amino acid sequence having at least 90% identity, at least 95% identity, or 100% identity to any one of SEQ ID NOs:49, 57, 650, 686, 776, 848, 722 and 812; and a CDR3 comprising an amino acid sequence having at least 90% identity, at least 95% identity, or 100% identity to any one of SEQ ID NOs:50, 58, 651, 687, 777, 849, 723 and 813. In some aspects, VL1 comprises a CDR1 comprising an amino acid sequence having at least 90% identity to SEQ ID NO:51; a CDR2 comprising an amino acid sequence having at least 90% identity to SEQ ID NO:52; and a CDR3 comprising an amino acid sequence having at least 90% identity to SEQ ID NO:53; and VH1 comprises a CDR1 comprising an amino acid sequence having at least 90% identity to SEQ ID NO:48; a CDR2 comprising an amino acid sequence having at least 90% identity to SEQ ID NO:49; and a CDR3 comprising an amino acid sequence having at least 90% identity to SEQ ID NO:50. In some aspects, VL1 comprises a CDR1 comprising an amino acid sequence having at least 90% identity to SEQ ID NO:59; a CDR2 comprising an amino acid sequence having at least 90% identity to SEQ ID NO:60; and a CDR3 comprising an amino acid sequence having at least 90% identity to SEQ ID NO:61; and VH1 comprises a CDR1 comprising an amino acid sequence having at least 90% identity to SEQ ID NO:56; a CDR2 comprising an amino acid sequence having at least 90% identity to SEQ ID NO:57; and a CDR3 comprising an amino acid sequence having at least 90% identity to SEQ ID NO:58. In some aspects, VL1 comprises a CDR1 comprising an amino acid sequence having at least 90% identity to SEQ ID NO:645; a CDR2 comprising an amino acid sequence having at least 90% identity to SEQ ID NO:646; and a CDR3 comprising an amino acid sequence having at least 90% identity to SEQ ID NO:647; and VH1 comprises a CDR1 comprising an amino acid sequence having at least 90% identity to SEQ ID NO:649; a CDR2 comprising an amino acid sequence having at least 90% identity to SEQ ID NO:650; and a CDR3 comprising an amino acid sequence having at least 90% identity to SEQ ID NO:651. In some aspects, VL1 comprises a CDR1 comprising an amino acid sequence having at least 90% identity to SEQ ID NO:681; a CDR2 comprising an amino acid sequence having at least 90% identity to SEQ ID NO:682; and a CDR3 comprising an amino acid sequence having at least 90% identity to SEQ ID NO:683; and VH1 comprises a CDR1 comprising an amino acid sequence having at least 90% identity to SEQ ID NO:685; a CDR2 comprising an amino acid sequence having at least 90% identity to SEQ ID NO:686; and a CDR3 comprising an amino acid sequence having at least 90% identity to SEQ ID NO:687. In some aspects, VL1 comprises a CDR1 comprising an amino acid sequence having at least 90% identity to SEQ ID NO:771; a CDR2 comprising an amino acid sequence having at least 90% identity to SEQ ID NO:772; and a CDR3 comprising an amino acid sequence having at least 90% identity to SEQ ID NO:773; and VH1 comprises a CDR1 comprising an amino acid sequence having at least 90% identity to SEQ ID NO:775; a CDR2 comprising an amino acid sequence having at least 90% identity to SEQ ID NO:776; and a CDR3 comprising an amino acid sequence having at least 90% identity to SEQ ID NO:777. In some aspects, VL1 comprises a CDR1 comprising an amino acid sequence having at least 90% identity to SEQ ID NO:843; a CDR2 comprising an amino acid sequence having at least 90% identity to SEQ ID NO:844; and a CDR3 comprising an amino acid sequence having at least 90% identity to SEQ ID NO:845; and VH1 comprises a CDR1 comprising an amino acid sequence having at least 90% identity to SEQ ID NO:847; a CDR2 comprising an amino acid sequence having at least 90% identity to SEQ ID NO: 848; and a CDR3 comprising an amino acid sequence having at least 90% identity to SEQ ID NO:849. As used herein, “at least 90% identity” includes at least 91%, 92%, 93%, 94%, 95%, 96%, 97%, 98%, 99% and 100% identity to the recited reference sequence. In some aspects, VL1 comprises a CDR1 comprising the amino acid sequence of SEQ ID NO:51; a CDR2 comprising the amino acid sequence of SEQ ID NO:52; and a CDR3 comprising the amino acid sequence of SEQ ID NO:53; and VH1 comprises a CDR1 comprising the amino acid sequence of SEQ ID NO:48; a CDR2 comprising the amino acid sequence of SEQ ID NO:49; and a CDR3 comprising the amino acid sequence of SEQ ID NO:50. In some aspects, VL1 comprises a CDR1 comprising the amino acid sequence of SEQ ID NO:59; a CDR2 comprising the amino acid sequence of SEQ ID NO:60; and a CDR3 comprising the amino acid sequence of SEQ ID NO:61; and VH1 comprises a CDR1 comprising the amino acid sequence of SEQ ID NO:56; a CDR2 comprising the amino acid sequence of SEQ ID NO:57; and a CDR3 comprising the amino acid sequence of SEQ ID NO:58. In some aspects, VL1 comprises a CDR1 comprising the amino acid sequence of SEQ ID NO:645; a CDR2 comprising the amino acid sequence of SEQ ID NO:646; and a CDR3 comprising the amino acid sequence of SEQ ID NO:647; and VH1 comprises a CDR1 comprising the amino acid sequence of SEQ ID NO:649; a CDR2 comprising the amino acid sequence of SEQ ID NO:650; and a CDR3 comprising the amino acid sequence of SEQ ID NO:651. In some aspects, VL1 comprises a CDR1 comprising the amino acid sequence of SEQ ID NO:681; a CDR2 comprising the amino acid sequence of SEQ ID NO:682; and a CDR3 comprising the amino acid sequence of SEQ ID NO:683; and VH1 comprises a CDR1 comprising the amino acid sequence of SEQ ID NO:685; a CDR2 comprising the amino acid sequence of SEQ ID NO:686; and a CDR3 comprising the amino acid sequence of SEQ ID NO:687. In some aspects, VL1 comprises a CDR1 comprising the amino acid sequence of SEQ ID NO:771; a CDR2 comprising the amino acid sequence of SEQ ID NO:772; and a CDR3 comprising the amino acid sequence of SEQ ID NO:773; and VH1 comprises a CDR1 comprising the amino acid sequence of SEQ ID NO:775; a CDR2 comprising the amino acid sequence of SEQ ID NO:776; and a CDR3 comprising the amino acid sequence of SEQ ID NO:777. In some aspects, VL1 comprises a CDR1 comprising the amino acid sequence of SEQ ID NO:843; a CDR2 comprising the amino acid sequence of SEQ ID NO:844; and a CDR3 comprising the amino acid sequence of SEQ ID NO:845; and VH1 comprises a CDR1 comprising the amino acid sequence of SEQ ID NO:847; a CDR2 comprising the amino acid sequence of SEQ ID NO:848; and a CDR3 comprising the amino acid sequence of SEQ ID NO:849. In some aspects, VL1 comprises an amino acid sequence having at least 80%, at least 85%, at least 90%, at least 95%, or 100% identity to SEQ ID NO:55 or 63; and VH1 comprises an amino acid sequence having at least 80%, at least 85%, at least 90%, at least 95%, or 100% identity to SEQ ID NO:54 or 62. In some aspects, VL1 comprises an amino acid sequence having at least 80% identity (such as at least 85%, 90%, 91%, 92%, 93%, 94%, 95%, 96%, 97%, 98%, 99% or 100% identity) to SEQ ID NO:55; and/or VH1 comprises an amino acid sequence having at least 80% identity (such as at least 85%, 90%, 91%, 92%, 93%, 94%, 95%, 96%, 97%, 98%, 99% or 100% identity) to SEQ ID NO:54. In some aspects, VL1 comprises an amino acid sequence having at least 80% identity (such as at least 85%, 90%, 91%, 92%, 93%, 94%, 95%, 96%, 97%, 98%, 99% or 100% identity) to SEQ ID NO:63; and/or VH1 comprises an amino acid sequence having at least 80% identity (such as at least 85%, 90%, 91%, 92%, 93%, 94%, 95%, 96%, 97%, 98%, 99% or 100% identity) to SEQ ID NO:62. In some aspects, VL1 comprises an amino acid sequence having at least 80% identity (such as at least 85%, 90%, 91%, 92%, 93%, 94%, 95%, 96%, 97%, 98%, 99% or 100% identity) to SEQ ID NO:55; and/or VH1 comprises an amino acid sequence having at least 80% identity (such as at least 85%, 90%, 91%, 92%, 93%, 94%, 95%, 96%, 97%, 98%, 99% or 100% identity) to SEQ ID NO:62. In some aspects, VL1 comprises an amino acid sequence having at least 80% identity (such as at least 85%, 90%, 91%, 92%, 93%. 94%. 95%. 96%, 97%. 98%, 99% or 100% identity) to SEQ ID NO:63; and/or VH1 comprises an amino acid sequence having at least 80% identity (such as at least 85%, 90%, 91%, 92%, 93%, 94%, 95%, 96%, 97%, 98%, 99% or 100% identity) to SEQ ID NO:54.

[0153] In some aspects, VL2 and VH2 specifically bind to an immune stimulating receptor (such sa CD28). In some aspects, VL2 comprises a CDR1 comprising an amino acid sequence having at least 90% identity, at least 95% identity, or 100% identity to any one of SEQ ID NOs:51, 59, 645, 681, 771 and 843; a CDR2 comprising an amino acid sequence having at least 90% identity, at least 95% identity, or 100% identity to any one of SEQ ID NOs:52, 60, 646, 682, 772 and 844; and a CDR3 comprising an amino acid sequence having at least 90% identity, at least 95% identity, or 100% identity to any one of SEQ ID NOs:53, 61, 647, 683, 773 and 845; and VH2 comprises a CDR1 comprising an amino acid sequence having at least 90% identity, at least 95% identity, or 100% identity to any one of SEQ ID NOs:48, 56, 649, 685, 775 and 847; a CDR2 comprising an amino acid sequence having at least 90% identity, at least 95% identity, or 100% identity to any one of SEQ ID NOs:49, 57, 650, 686, 776 and 848; and a CDR3 comprising an amino acid sequence having at least 90% identity, at least 95% identity, or 100% identity to any one of SEQ ID NOs:50, 58, 651, 687, 777 and 849. In some aspects, VL2 comprises a CDR1 comprising an amino acid sequence having at least 90% identity to SEQ ID NO:51; a CDR2 comprising an amino acid sequence having at least 90% identity to SEQ ID NO:52; and a CDR3 comprising an amino acid sequence having at least 90% identity to SEQ ID NO:53; and VH2 comprises a CDR1 comprising an amino acid sequence having at least 90% identity to SEQ ID NO:48; a CDR2 comprising an amino acid sequence having at least 90% identity to SEQ ID NO:49; and a CDR3 comprising an amino acid sequence having at least 90% identity to SEQ ID NO:50. In some aspects, VL2 comprises a CDR1 comprising an amino acid sequence having at least 90% identity to SEQ ID NO:59; a CDR2 comprising an amino acid sequence having at least 90% identity to SEQ ID NO:60; and a CDR3 comprising an amino acid sequence having at least 90% identity to SEQ ID NO:61; and VH2 comprises a CDR1 comprising an amino acid sequence having at least 90% identity to SEQ ID NO:56; a CDR2 comprising an amino acid sequence having at least 90% identity to SEQ ID NO:57; and a CDR3 comprising an amino acid sequence having at least 90% identity to SEQ ID NO:58. In some aspects, VL2 comprises a CDR1 comprising an amino acid sequence having at least 90% identity to SEQ ID NO:645; a CDR2 comprising an amino acid sequence having at least 90% identity to SEQ ID NO:646; and a CDR3 comprising an amino acid sequence having at least 90% identity to SEQ ID NO:647; and VH2 comprises a CDR1 comprising an amino acid sequence having at least 90% identity to SEQ ID NO:649; a CDR2 comprising an amino acid sequence having at least 90% identity to SEQ ID NO:650; and a CDR3 comprising an amino acid sequence having at least 90% identity to SEQ ID NO:651. In some aspects, VL2 comprises a CDR1 comprising an amino acid sequence having at least 90% identity to SEQ ID NO:681; a CDR2 comprising an amino acid sequence having at least 90% identity to SEQ ID NO:682; and a CDR3 comprising an amino acid sequence having at least 90% identity to SEQ ID NO:683; and VH2 comprises a CDR1 comprising an amino acid sequence having at least 90% identity to SEQ ID NO:685; a CDR2 comprising an amino acid sequence having at least 90% identity to SEQ ID NO:686; and a CDR3 comprising an amino acid sequence having at least 90% identity to SEQ ID NO:687. In some aspects, VL2 comprises a CDR1 comprising an amino acid sequence having at least 90% identity to SEQ ID NO:771; a CDR2 comprising an amino acid sequence having at least 90% identity to SEQ ID NO:772; and a CDR3 comprising an amino acid sequence having at least 90% identity to SEQ ID NO:773; and VH2 comprises a CDR1 comprising an amino acid sequence having at least 90% identity to SEQ ID NO:775; a CDR2 comprising an amino acid sequence having at least 90% identity to SEQ ID NO:776; and a CDR3 comprising an amino acid sequence having at least 90% identity to SEQ ID NO:777. In some aspects, VL2 comprises a CDR1 comprising an amino acid sequence having at least 90% identity to SEQ ID NO:843; a CDR2 comprising an amino acid sequence having at least 90% identity to SEQ ID NO: 844; and a CDR3 comprising an amino acid sequence having at least 90% identity to SEQ ID NO:845; and VH2 comprises a CDR1 comprising an amino acid sequence having at least 90% identity to SEQ ID NO:847; a CDR2 comprising an amino acid sequence having at least 90% identity to SEQ ID NO: 848; and a CDR3 comprising an amino acid sequence having at least 90% identity to SEQ ID NO:849. As used herein, “at least 90% identity” includes at least 91%, 92%, 93%, 94%, 95%, 96%, 97%, 98%, 99% and 100% identity to the recited reference sequence. In some aspects, VL2 comprises a CDR1 comprising the amino acid sequence of SEQ ID NO:51; a CDR2 comprising the amino acid sequence of SEQ ID NO:52; and a CDR3 comprising the amino acid sequence of SEQ ID NO:53; and VH2 comprises a CDR1 comprising the amino acid sequence of SEQ ID NO:48; a CDR2 comprising the amino acid sequence of SEQ ID NO:49; and a CDR3 comprising the amino acid sequence of SEQ ID NO:50. In some aspects, VL2 comprises a CDR1 comprising the amino acid sequence of SEQ ID NO:59; a CDR2 comprising the amino acid sequence of SEQ ID NO:60; and a CDR3 comprising the amino acid sequence of SEQ ID NO:61; and VH2 comprises a CDR1 comprising the amino acid sequence of SEQ ID NO:56; a CDR2 comprising the amino acid sequence of SEQ ID NO:57; and a CDR3 comprising the amino acid sequence of SEQ ID NO:58. In some aspects, VL2 comprises a CDR1 comprising the amino acid sequence of SEQ ID NO:645; a CDR2 comprising the amino acid sequence of SEQ ID NO:646; and a CDR3 comprising the amino acid sequence of SEQ ID NO:647; and VH2 comprises a CDR1 comprising the amino acid sequence of SEQ ID NO:649; a CDR2 comprising the amino acid sequence of SEQ ID NO:650; and a CDR3 comprising the amino acid sequence of SEQ ID NO:651. In some aspects, VL2 comprises a CDR1 comprising the amino acid sequence of SEQ ID NO:681; a CDR2 comprising the amino acid sequence of SEQ ID NO:682; and a CDR3 comprising the amino acid sequence of SEQ ID NO:683; and VH2 comprises a CDR1 comprising the amino acid sequence of SEQ ID NO:685; a CDR2 comprising the amino acid sequence of SEQ ID NO:686; and a CDR3 comprising the amino acid sequence of SEQ ID NO:687. In some aspects, VL2 comprises a CDR1 comprising the amino acid sequence of SEQ ID NO:771; a CDR2 comprising the amino acid sequence of SEQ ID NO:772; and a CDR3 comprising the amino acid sequence of SEQ ID NO:773; and VH2 comprises a CDR1 comprising the amino acid sequence of SEQ ID NO:775; a CDR2 comprising the amino acid sequence of SEQ ID NO:776; and a CDR3 comprising the amino acid sequence of SEQ ID NO:777. In some aspects, VL2 comprises a CDR1 comprising the amino acid sequence of SEQ ID NO:843; a CDR2 comprising the amino acid sequence of SEQ ID NO:844; and a CDR3 comprising the amino acid sequence of SEQ ID NO:845; and VH2 comprises a CDR1 comprising the amino acid sequence of SEQ ID NO:847; a CDR2 comprising the amino acid sequence of SEQ ID NO:848; and a CDR3 comprising the amino acid sequence of SEQ ID NO:849. In some aspects, VL2 comprises an amino acid sequence having at least 80%, at least 85%, at least 90%, at least 95%, or 100% identity to SEQ ID NO:55 or 63; and VH2 comprises an amino acid sequence having at least 80%, at least 85%, at least 90%, at least 95%, or 100% identity to SEQ ID NO:54 or 62. In some aspects, VL2 comprises an amino acid sequence having at least 80% identity (such as at least 85%, 90%, 91%, 92%, 93%, 94%, 95%, 96%, 97%, 98%, 99% or 100% identity) to SEQ ID NO:55; and/or VH2 comprises an amino acid sequence having at least 80% identity (such as at least 85%, 90%, 91%, 92%, 93%, 94%, 95%, 96%, 97%, 98%, 99% or 100% identity) to SEQ ID NO:54. In some aspects, VL2 comprises an amino acid sequence having at least 80% identity (such as at least 85%, 90%, 91%, 92%, 93%, 94%, 95%, 96%, 97%, 98%, 99% or 100% identity) to SEQ ID NO:63; and/or VH2 comprises an amino acid sequence having at least 80% identity (such as at least 85%, 90%, 91%, 92%, 93%, 94%. 95%, 96%, 97%. 98%, 99% or 100% identity) to SEQ ID NO:62. In some aspects, VL2 comprises an amino acid sequence having at least 80% identity (such as at least 85%, 90%, 91%, 92%, 93%, 94%, 95%, 96%, 97%, 98%, 99% or 100% identity) to SEQ ID NO:55; and/or VH2 comprises an amino acid sequence having at least 80% identity (such as at least 85%, 90%, 91%, 92%, 93%, 94%, 95%, 96%, 97%, 98%, 99% or 100% identity) to SEQ ID NO:62. In some aspects, VL2 comprises an amino acid sequence having at least 80% identity (such as at least 85%, 90%, 91%, 92%, 93%, 94%, 95%, 96%, 97%, 98%, 99% or 100% identity) to SEQ ID NO:63; and/or VH2 comprises an amino acid sequence having at least 80% identity (such as at least 85%, 90%, 91%, 92%, 93%, 94%, 95%, 96%, 97%, 98%, 99% or 100% identity) to SEQ ID NO:54.

[0154] In some aspects, VL3 and VH3 specifically bind to an immune stimulating receptor (such as CD28). In some aspects, VL3 comprises a CDR1 comprising an amino acid sequence having at least 90% identity, at least 95% identity, or 100% identity to any one of SEQ ID NOs:51, 59, 645, 681, 771 and 843; a CDR2 comprising an amino acid sequence having at least 90% identity, at least 95% identity, or 100% identity to any one of SEQ ID NOs:52, 60, 646, 682, 772 and 844; and a CDR3 comprising an amino acid sequence having at least 90% identity, at least 95% identity, or 100% identity to any one of SEQ ID NOs:53, 61, 647, 683, 773 and 845; and VH3 comprises a CDR1 comprising an amino acid sequence having at least 90% identity, at least 95% identity, or 100% identity to any one of SEQ ID NOs:48, 56, 649, 685, 775 and 847; a CDR2 comprising an amino acid sequence having at least 90% identity, at least 95% identity, or 100% identity to any one of SEQ ID NOs:49, 57, 650, 686, 776 and 848; and a CDR3 comprising an amino acid sequence having at least 90% identity, at least 95% identity, or 100% identity to any one of SEQ ID NOs:50, 58, 651, 687, 777 and 849. In some aspects, VL3 comprises a CDR1 comprising an amino acid sequence having at least 90% identity to SEQ ID NO:51; a CDR2 comprising an amino acid sequence having at least 90% identity to SEQ ID NO:52; and a CDR3 comprising an amino acid sequence having at least 90% identity to SEQ ID NO:53; and VH3 comprises a CDR1 comprising an amino acid sequence having at least 90% identity to SEQ ID NO:48; a CDR2 comprising an amino acid sequence having at least 90% identity to SEQ ID NO:49; and a CDR3 comprising an amino acid sequence having at least 90% identity to SEQ ID NO:50. In some aspects, VL3 comprises a CDR1 comprising an amino acid sequence having at least 90% identity to SEQ ID NO:59; a CDR2 comprising an amino acid sequence having at least 90% identity to SEQ ID NO:60; and a CDR3 comprising an amino acid sequence having at least 90% identity to SEQ ID NO:61; and VH3 comprises a CDR1 comprising an amino acid sequence having at least 90% identity to SEQ ID NO:56; a CDR2 comprising an amino acid sequence having at least 90% identity to SEQ ID NO:57; and a CDR3 comprising an amino acid sequence having at least 90% identity to SEQ ID NO:58. In some aspects, VL3 comprises a CDR1 comprising the amino acid sequence of SEQ ID NO:645; a CDR2 comprising the amino acid sequence of SEQ ID NO:646; and a CDR3 comprising the amino acid sequence of SEQ ID NO:647; and VH3 comprises a CDR1 comprising the amino acid sequence of SEQ ID NO:649; a CDR2 comprising the amino acid sequence of SEQ ID NO:650; and a CDR3 comprising the amino acid sequence of SEQ ID NO:651. In some aspects, VL3 comprises a CDR1 comprising the amino acid sequence of SEQ ID NO:681; a CDR2 comprising the amino acid sequence of SEQ ID NO:682; and a CDR3 comprising the amino acid sequence of SEQ ID NO:683; and VH3 comprises a CDR1 comprising the amino acid sequence of SEQ ID NO:685; a CDR2 comprising the amino acid sequence of SEQ ID NO:686; and a CDR3 comprising the amino acid sequence of SEQ ID NO:687. In some aspects, VL3 comprises a CDR1 comprising the amino acid sequence of SEQ ID NO:771; a CDR2 comprising the amino acid sequence of SEQ ID NO:772; and a CDR3 comprising the amino acid sequence of SEQ ID NO:773; and VH3 comprises a CDR1 comprising the amino acid sequence of SEQ ID NO:775; a CDR2 comprising the amino acid sequence of SEQ ID NO:776; and a CDR3 comprising the amino acid sequence of SEQ ID NO:777. In some aspects, VL3 comprises a CDR1 comprising the amino acid sequence of SEQ ID NO:843; a CDR2 comprising the amino acid sequence of SEQ ID NO:844; and a CDR3 comprising the amino acid sequence of SEQ ID NO:845; and VH3 comprises a CDR1 comprising the amino acid sequence of SEQ ID NO:847; a CDR2 comprising the amino acid sequence of SEQ ID NO:848; and a CDR3 comprising the amino acid sequence of SEQ ID NO:849. As used herein, “at least 90% identity” includes at least 91%, 92%, 93%, 94%, 95%, 96%, 97%, 98%, 99% and 100% identity to the recited reference sequence. In some aspects, VL3 comprises a CDR1 comprising the amino acid sequence of SEQ ID NO:51; a CDR2 comprising the amino acid sequence of SEQ ID NO:52; and a CDR3 comprising the amino acid sequence” of SEQ ID NO:53; and VH3 comprises a CDR1 comprising the amino acid sequence of SEQ ID NO:48; a CDR2 comprising the amino acid sequence of SEQ ID NO:49; and a CDR3 comprising the amino acid sequence of SEQ ID NO:50. In some aspects, VL3 comprises a CDR1 comprising the amino acid sequence of SEQ ID NO:59; a CDR2 comprising the amino acid sequence of SEQ ID NO:60; and a CDR3 comprising the amino acid sequence of SEQ ID NO:61; and VH3 comprises a CDR1 comprising the amino acid sequence of SEQ ID NO:56; a CDR2 comprising the amino acid sequence of SEQ ID NO:57; and a CDR3 comprising the amino acid sequence of SEQ ID NO:58. In some aspects, VL3 comprises a CDR1 comprising an amino acid sequence having at least 90% identity to SEQ ID NO:645; a CDR2 comprising an amino acid sequence having at least 90% identity to SEQ ID NO:646; and a CDR3 comprising an amino acid sequence having at least 90% identity to SEQ ID NO:647; and VH3 comprises a CDR1 comprising an amino acid sequence having at least 90% identity to SEQ ID NO:649; a CDR2 comprising an amino acid sequence having at least 90% identity to SEQ ID NO:650; and a CDR3 comprising an amino acid sequence having at least 90% identity to SEQ ID NO:651. In some aspects, VL3 comprises a CDR1 comprising an amino acid sequence having at least 90% identity to SEQ ID NO:681; a CDR2 comprising an amino acid sequence having at least 90% identity to SEQ ID NO:682; and a CDR3 comprising an amino acid sequence having at least 90% identity to SEQ ID NO:683; and VH3 comprises a CDR1 comprising an amino acid sequence having at least 90% identity to SEQ ID NO:685; a CDR2 comprising an amino acid sequence having at least 90% identity to SEQ ID NO:686; and a CDR3 comprising an amino acid sequence having at least 90% identity to SEQ ID NO:687. In some aspects, VL3 comprises a CDR1 comprising an amino acid sequence having at least 90% identity to SEQ ID NO:771; a CDR2 comprising an amino acid sequence having at least 90% identity to SEQ ID NO:772; and a CDR3 comprising an amino acid sequence having at least 90% identity to SEQ ID NO:773; and VH3 comprises a CDR1 comprising an amino acid sequence having at least 90% identity to SEQ ID NO:775; a CDR2 comprising an amino acid sequence having at least 90% identity to SEQ ID NO:776; and a CDR3 comprising an amino acid sequence having at least 90% identity to SEQ ID NO:777. In some aspects, VL3 comprises a CDR1 comprising an amino acid sequence having at least 90% identity to SEQ ID NO:843; a CDR2 comprising an amino acid sequence having at least 90% identity to SEQ ID NO: 844; and a CDR3 comprising an amino acid sequence having at least 90% identity to SEQ ID NO:845; and VH3 comprises a CDR1 comprising an amino acid sequence having at least 90% identity to SEQ ID NO:847; a CDR2 comprising an amino acid sequence having at least 90% identity to SEQ ID NO: 848; and a CDR3 comprising an amino acid sequence having at least 90% identity to SEQ ID NO:849. In some aspects, VL3 comprises an amino acid sequence having at least 80%, at least 85%, at least 90%, at least 95%, or 100% identity to SEQ ID NO:55 or 63; and VH3 comprises an amino acid sequence having at least 80%, at least 85%, at least 90%, at least 95%, or 100% identity to SEQ ID NO:54 or 62. In some aspects, VL3 comprises an amino acid sequence having at least 80% identity (such as at least 85%, 90%, 91%, 92%, 93%, 94%, 95%, 96%, 97%, 98%, 99% or 100% identity) to SEQ ID NO:55; and/or VH3 comprises an amino acid sequence having at least 80% identity (such as at least 85%, 90%, 91%, 92%, 93%, 94%, 95%, 96%, 97%, 98%, 99% or 100% identity) to SEQ ID NO:54. In some aspects, VL3 comprises an amino acid sequence having at least 80% identity (such as at least 85%, 90%, 91%, 92%, 93%, 94%, 95%, 96%, 97%, 98%, 99% or 100% identity) to SEQ ID NO:63; and/or VH3 comprises an amino acid sequence having at least 80% identity (such as at least 85%, 90%, 91%, 92%, 93%, 94%, 95%, 96%, 97%, 98%, 99% or 100% identity) to SEQ ID NO:62. In some aspects, VL3 comprises an amino acid sequence having at least 80% identity (such as at least 85%, 90%, 91%, 92%, 93%, 94%, 95%, 96%, 97%, 98%, 99% or 100% identity) to SEQ ID NO:55; and/or VH3 comprises an amino acid sequence having at least 80% identity (such as at least 85%, 90%, 91%, 92%, 93%, 94%, 95%, 96%, 97%, 98%, 99% or 100% identity) to SEQ ID NO:62. In some aspects, VL3 comprises an amino acid sequence having at least 80% identity (such as at least 85%, 90%, 91%, 92%, 93%, 94%, 95%, 96%, 97%, 98%, 99% or 100% identity) to SEQ ID NO:63; and/or VH3 comprises an amino acid sequence having at least 80% identity (such as at least 85%, 90%, 91%, 92%, 93%, 94%, 95%, 96%, 97%, 98%, 99% or 100% identity) to SEQ ID NO:54.

[0155] In some aspects, VL4 and VH4 specifically bind to an immune stimulating receptor (such as CD28). In some aspects, VL4 comprises a CDR1 comprising an amino acid sequence having at least 90% identity, at least 95% identity, or 100% identity to any one of SEQ ID NOs:51, 59, 645, 681, 771 and 843; a CDR2 comprising an amino acid sequence having at least 90% identity, at least 95% identity, or 100% identity to any one of SEQ ID NOs:52, 60, 646, 682, 772 and 844; and a CDR3 comprising an amino acid sequence having at least 90% identity, at least 95% identity, or 100% identity to any one of SEQ ID NOs:53, 61, 647, 683, 773 and 845; and VH4 comprises a CDR1 comprising an amino acid sequence having at least 90% identity, at least 95% identity, or 100% identity to any one of SEQ ID NOs:48, 56, 649, 685, 775 and 847; a CDR2 comprising an amino acid sequence having at least 90% identity, at least 95% identity, or 100% identity to any one of SEQ ID NOs:49, 57, 650, 686, 776 and 848; and a CDR3 comprising an amino acid sequence having at least 90% identity, at least 95% identity, or 100% identity to any one of SEQ ID NOs:50, 58, 651, 687, 777 and 849. In some aspects, VL4 comprises a CDR1 comprising an amino acid sequence having at least 90% identity to SEQ ID NO:51; a CDR2 comprising an amino acid sequence having at least 90% identity to SEQ ID NO:52; and a CDR3 comprising an amino acid sequence having at least 90% identity to SEQ ID NO:53; and VH4 comprises a CDR1 comprising an amino acid sequence having at least 90% identity to SEQ ID NO:48; a CDR2 comprising an amino acid sequence having at least 90% identity to SEQ ID NO:49; and a CDR3 comprising an amino acid sequence having at least 90% identity to SEQ ID NO:50. In some aspects, VL4 comprises a CDR1 comprising an amino acid sequence having at least 90% identity to SEQ ID NO:59; a CDR2 comprising an amino acid sequence having at least 90% identity to SEQ ID NO:60; and a CDR3 comprising an amino acid sequence having at least 90% identity to SEQ ID NO:61; and VH4 comprises a CDR1 comprising an amino acid sequence having at least 90% identity to SEQ ID NO:56; a CDR2 comprising an amino acid sequence having at least 90% identity to SEQ ID NO:57; and a CDR3 comprising an amino acid sequence having at least 90% identity to SEQ ID NO:58. In some aspects, VL4 comprises a CDR1 comprising an amino acid sequence having at least 90% identity to SEQ ID NO:645; a CDR2 comprising an amino acid sequence having at least 90% identity to SEQ ID NO:646; and a CDR3 comprising an amino acid sequence having at least 90% identity to SEQ ID NO:647; and VH4 comprises a CDR1 comprising an amino acid sequence having at least 90% identity to SEQ ID NO:649; a CDR2 comprising an amino acid sequence having at least 90% identity to SEQ ID NO:650; and a CDR3 comprising an amino acid sequence having at least 90% identity to SEQ ID NO:651. In some aspects, VL4 comprises a CDR1 comprising an amino acid sequence having at least 90% identity to SEQ ID NO:681; a CDR2 comprising an amino acid sequence having at least 90% identity to SEQ ID NO:682; and a CDR3 comprising an amino acid sequence having at least 90% identity to SEQ ID NO:683; and VH4 comprises a CDR1 comprising an amino acid sequence having at least 90% identity to SEQ ID NO:685; a CDR2 comprising an amino acid sequence having at least 90% identity to SEQ ID NO:686; and a CDR3 comprising an amino acid sequence having at least 90% identity to SEQ ID NO:687. In some aspects, VL4 comprises a CDR1 comprising an amino acid sequence having at least 90% identity to SEQ ID NO:771; a CDR2 comprising an amino acid sequence having at least 90% identity to SEQ ID NO:772; and a CDR3 comprising an amino acid sequence having at least 90% identity to SEQ ID NO:773; and VH4 comprises a CDR1 comprising an amino acid sequence having at least 90% identity to SEQ ID NO:775; a CDR2 comprising an amino acid sequence having at least 90% identity to SEQ ID NO:776; and a CDR3 comprising an amino acid sequence having at least 90% identity to SEQ ID NO:777. In some aspects, VL4 comprises a CDR1 comprising an amino acid sequence having at least 90% identity to SEQ ID NO:843; a CDR2 comprising an amino acid sequence having at least 90% identity to SEQ ID NO: 844; and a CDR3 comprising an amino acid sequence having at least 90% identity to SEQ ID NO:845; and VH4 comprises a CDR1 comprising an amino acid sequence having at least 90% identity to SEQ ID NO:847; a CDR2 comprising an amino acid sequence having at least 90% identity to SEQ ID NO:848; and a CDR3 comprising an amino acid sequence having at least 90% identity to SEQ ID NO:849. As used herein, “at least 90% identity” includes at least 91%, 92%, 93%, 94%, 95%, 96%, 97%, 98%, 99% and 100% identity to the recited reference sequence. In some aspects, VL4 comprises a CDR1 comprising the amino acid sequence of SEQ ID NO:51; a CDR2 comprising the amino acid sequence of SEQ ID NO:52; and a CDR3 comprising the amino acid sequence of SEQ ID NO:53; and VH4 comprises a CDR1 comprising the amino acid sequence of SEQ ID NO:48; a CDR2 comprising the amino acid sequence of SEQ ID NO:49; and a CDR3 comprising the amino acid sequence of SEQ ID NO:50 In some aspects, VL4 comprises a CDR1 comprising the amino acid sequence of SEQ ID NO:59; a CDR2 comprising the amino acid sequence of SEQ ID NO:60; and a CDR3 comprising the amino acid sequence of SEQ ID NO:61; and VH4 comprises a CDR1 comprising the amino acid sequence of SEQ ID NO:56; a CDR2 comprising the amino acid sequence of SEQ ID NO:57; and a CDR3 comprising the amino acid sequence of SEQ ID NO:58. In some aspects, VL4 comprises a CDR1 comprising the amino acid sequence of SEQ ID NO:645; a CDR2 comprising the amino acid sequence of SEQ ID NO:646; and a CDR3 comprising the amino acid sequence of SEQ ID NO:647; and VH4 comprises a CDR1 comprising the amino acid sequence of SEQ ID NO:649; a CDR2 comprising the amino acid sequence of SEQ ID NO:650; and a CDR3 comprising the amino acid sequence of SEQ ID NO:651. In some aspects, VL4 comprises a CDR1 comprising the amino acid sequence of SEQ ID NO:681; a CDR2 comprising the amino acid sequence of SEQ ID NO:682; and a CDR3 comprising the amino acid sequence of SEQ ID NO:683; and VH4 comprises a CDR1 comprising the amino acid sequence of SEQ ID NO:685; a CDR2 comprising the amino acid sequence of SEQ ID NO:686; and a CDR3 comprising the amino acid sequence of SEQ ID NO:687. In some aspects, VL4 comprises a CDR1 comprising the amino acid sequence of SEQ ID NO:771; a CDR2 comprising the amino acid sequence of SEQ ID NO:772; and a CDR3 comprising the amino acid sequence of SEQ ID NO:773; and VH4 comprises a CDR1 comprising the amino acid sequence of SEQ ID NO:775; a CDR2 comprising the amino acid sequence of SEQ ID NO:776; and a CDR3 comprising the amino acid sequence of SEQ ID NO:777. In some aspects, VL4 comprises a CDR1 comprising the amino acid sequence of SEQ ID NO:843; a CDR2 comprising the amino acid sequence of SEQ ID NO:844; and a CDR3 comprising the amino acid sequence of SEQ ID NO:845; and VH4 comprises a CDR1 comprising the amino acid sequence of SEQ ID NO:847; a CDR2 comprising the amino acid sequence of SEQ ID NO:848; and a CDR3 comprising the amino acid sequence of SEQ ID NO:849. In some aspects, VL4 comprises an amino acid sequence having at least 80%, at least 85%, at least 90%, at least 95%, or 100% identity to SEQ ID NO:55 or 63; and VH4 comprises an amino acid sequence having at least 80%, at least 85%, at least 90%, at least 95%, or 100% identity to SEQ ID NO:54 or 62. In some aspects, VL4 comprises an amino acid sequence having at least 80% identity (such as at least 85%, 90%, 91%, 92%, 93%, 94%, 95%, 96%, 97%, 98%, 99% or 100% identity) to SEQ ID NO:55; and/or VH4 comprises an amino acid sequence having at least 80% identity (such as at least 85%, 90%, 91%, 92%, 93%, 94%, 95%, 96%, 97%, 98%, 99% or 100% identity) to SEQ ID NO:54. In some aspects, VL4 comprises an amino acid sequence having at least 80% identity (such as at least 85%, 90%, 91%, 92%, 93%, 94%, 95%, 96%, 97%, 98%, 99% or 100% identity) to SEQ ID NO:63; and/or VH4 comprises an amino acid sequence having at least 80% identity (such as at least 85%, 90%, 91%, 92%, 93%, 94%, 95%, 96%, 97%, 98%, 99% or 100% identity) to SEQ ID NO:62. In some aspects, VL4 comprises an amino acid sequence having at least 80% identity (such as at least 85%, 90%, 91%, 92%, 93%, 94%, 95%, 96%, 97%, 98%, 99% or 100% identity) to SEQ ID NO:55; and/or VH4 comprises an amino acid sequence having at least 80% identity (such as at least 85%, 90%, 91%, 92%, 93%, 94%, 95%, 96%, 97%, 98%, 99% or 100% identity) to SEQ ID NO:62. In some aspects, VL4 comprises an amino acid sequence having at least 80% identity (such as at least 85%, 90%, 91%, 92%, 93%, 94%, 95%, 96%, 97%, 98%, 99% or 100% identity) to SEQ ID NO:63; and/or VH4 comprises an amino acid sequence having at least 80% identity (such as at least 85%, 90%, 91%, 92%, 93%, 94%, 95%, 96%, 97%, 98%, 99% or 100% identity) to SEQ ID NO:54.

[0156] In some aspects, the antigen binding polypeptide complex (e.g., antibody or antigen binding fragment thereof) of the invention specifically binds to CD28. In some aspects, the antigen binding polypeptide complex specifically binds to CD28 and CD3. In some aspects, the antigen binding polypeptide complex specifically binds to CD28, CD3, and one or more TAAs, such as, e.g., A2AR, APRIL, ATPDase, BAFF, BAFFR, BCMA, BlyS, BTK, BTLA, B7DC, B7H1, B7H2, B7H3, B7H4, B7H5, B7H6, B7H7, B7RP1, B7-4, C3, C5, CCL2, CCL3, CCL4, CCL5, CCL7, CCL8, CCL11, CCL15, CCL17, CCL19, CCL20, CCL21, CCL25, CCR3, CCR4, CD16A, CD19, CD20, CD24, CD27, CD28, CD30, CD38, CD39, CD40, CD40L, CD47, CD52, CD70, CD80, CD86, CD123, CD133, CD137, CD137L, CD160, CD272, CEACAM5, CLEC9, CLEC91, CRTH2, CSF-1, CSF-2, CSF-3, CXCL1, CXCL2, CXCL4, CXCL12, CXCL13, CXCR3, cMet, CTLA4, DLL3, DLL4, DNGR-1, E-cadherin, EGFR, ENTPD1, EpCAM, FCER1, FCER1A, FCER2, FGFR, FLAP, FOLH1, Gi24, GITR, GITRL, GPR5, GP100, GPRC5D, HER2, HER3, ICOSL, ICOS, HHLA2, HMGB1, HVEM, IDO, IFNa, IgE, IGF1R, IL2Rbeta, IL1, ILIA, IL1B, IL1F10, IL2, IL4, IL4Ra, IL5, IL5R, IL6, IL7, IL7Ra, IL8, IL9, IL9R, IL10, rhILlO, IL12, IL13, IL13Ra1, IL13Ra2, IL15, IL17, IL17Rb, IL18, IL22, IL23, IL25, IL7, IL33, IL35, ITGB4, ITK, KIR, LAG3, LAMP1, leptin, LPFS2, MHC class II, MUC-1, MUC-16, NCR3LG1, NKG2D, NKp46, NTPDase-1, OX40, OX40L, PD-1, PD-L1, PD-L2, PROM1, S152, SIRPalpha, SISP1, SLC, SPG64, ST2, STEAP1, STEAP2, Syk kinase, STEAP1, TROP2, TACI, TDO, TGFBETA, T14, TIGIT, TIM3, TLR, TLR2, TLR4, TLR5, TLR9, TMEF1, TNFa, TNFRSF7, Tp55, TREM1, TSLP, TSLPR, TWEAK, VEGF, VISTA, Vstm3, or WUCAM. For example, the antigen binding polypeptide complex may specifically bind CD3, CD28, CD19 and CD20. For example, the antigen binding polypeptide complex may specifically bind CD3, CD28, cMet and Trop2.

[0157] In some aspects, a VL and a corresponding VH of the antigen binding polypeptide complex specifically bind to CD28. In some aspects, one VL and one corresponding VH of the antigen binding polypeptide complex specifically bind to CD28. In some aspects, VL1 and VH1 specifically bind to CD28. In some aspects, VL1 comprises a CDR1 comprising an amino acid sequence having at least 90% identity, at least 95% identity, or 100% identity to any one of SEQ ID NOs:51, 59, 645, 681, 771 and 843; a CDR2 comprising an amino acid sequence having at least 90% identity, at least 95% identity, or 100% identity to any one of SEQ ID NOs:52, 60, 646, 682, 772 and 844; and a CDR3 comprising an amino acid sequence having at least 90% identity, at least 95% identity, or 100% identity to any one of SEQ ID NOs:53, 61, 647, 683, 773 and 845; and VH1 comprises a CDR1 comprising an amino acid sequence having at least 90% identity, at least 95% identity, or 100% identity to any one of SEQ ID NOs:48, 56, 649, 685, 775 and 847; a CDR2 comprising an amino acid sequence having at least 90% identity, at least 95% identity, or 100% identity to any one of SEQ ID NOs:49, 57, 650, 686, 776 and 848; and a CDR3 comprising an amino acid sequence having at least 90% identity, at least 95% identity, or 100% identity to any one of SEQ ID NOs:50, 58, 651, 687, 777 and 849. In some aspects, VL1 comprises an amino acid sequence having at least 80%, at least 85%, at least 90%, at least 95%, or 100% identity to any one of SEQ ID NOs:55, 63, 527, 644, 680, 770 and 842; and VH1 comprises an amino acid sequence having at least 80%, at least 85%, at least 90%, at least 95%, or 100% identity to any one of SEQ ID NOs:54, 62, 528, 648, 684, 774 and 846.

[0158] In some aspects, VL2 and VH2 specifically bind to CD28. In some aspects, VL2 comprises a CDR1 comprising an amino acid sequence having at least 90% identity, at least 95% identity, or 100% identity to any one of SEQ ID NOs:51, 59, 645, 681, 771 and 843; a CDR2 comprising an amino acid sequence having at least 90% identity, at least 95% identity, or 100% identity to any one of SEQ ID NOs:52, 60, 646, 682, 772 and 844; and a CDR3 comprising an amino acid sequence having at least 90% identity, at least 95% identity, or 100% identity to any one of SEQ ID NOs:53, 61, 647, 683, 773 and 845; and VH2 comprises a CDR1 comprising an amino acid sequence having at least 90% identity, at least 95% identity, or 100% identity to any one of SEQ ID NOs:48, 56, 649, 685, 775 and 847; a CDR2 comprising an amino acid sequence having at least 90% identity, at least 95% identity, or 100% identity to any one of SEQ ID NOs:49, 57, 650, 686, 776 and 848; and a CDR3 comprising an amino acid sequence having at least 90% identity, at least 95% identity, or 100% identity to any one of SEQ ID NOs:50, 58, 651, 687, 777 and 849. In some aspects, VL2 comprises an amino acid sequence having at least 80%, at least 85%, at least 90%, at least 95%, or 100% identity to any one of SEQ ID NOs:55, 63, 527, 644, 680, 770 and 842; and VH2 comprises an amino acid sequence having at least 80%, at least 85%, at least 90%, at least 95%, or 100% identity to any one of SEQ ID NOs:54, 62, 528, 648, 684, 774 and 846.

[0159] In some aspects, VL3 and VH3 specifically bind to CD28. In some aspects, VL3 comprises a CDR1 comprising an amino acid sequence having at least 90% identity, at least 95% identity, or 100% identity to any one of SEQ ID NOs:51, 59, 645, 681, 771 and 843; a CDR2 comprising an amino acid sequence having at least 90% identity, at least 95% identity, or 100% identity to ay one of SEQ ID NOs:52, 60, 646, 682, 772, 844; and a CDR3 comprising an amino acid sequence having at least 90% identity, at least 95% identity, or 100% identity to any one of SEQ ID NOs:53, 61, 647, 683, 773 and 845; and VH3 comprises a CDR1 comprising an amino acid sequence having at least 90% identity, at least 95% identity, or 100% identity to any one of SEQ ID NOs:48, 56, 649, 685, 775 and 847; a CDR2 comprising an amino acid sequence having at least 90% identity, at least 95% identity, or 100% identity to any one of SEQ ID NOs:49, 57, 650, 686, 776 and 848; and a CDR3 comprising an amino acid sequence having at least 90% identity, at least 95% identity, or 100% identity to any one of SEQ ID NOs:50, 58, 651, 687, 777 and 849. In some aspects, VL3 comprises an amino acid sequence having at least 80%, at least 85%, at least 90%, at least 95%, or 100% identity to any one of SEQ ID NOs:55, 63, 527, 644, 680, 770 and 842; and VH3 comprises an amino acid sequence having at least 80%, at least 85%, at least 90%, at least 95%, or 100% identity to any one of SEQ ID NOs:54, 62, 528, 648, 684, 774 and 846.

[0160] In some aspects, VL4 and VH4 specifically bind to CD28. In some aspects, VL4 comprises a CDR1 comprising an amino acid sequence having at least 90% identity, at least 95% identity, or 100% identity to any one of SEQ ID NOs:51, 59, 645, 681, 771 and 843; a CDR2 comprising an amino acid sequence having at least 90% identity, at least 95% identity, or 100% identity to any one of SEQ ID NOs:52, 60, 646, 682, 772 and 844; and a CDR3 comprising an amino acid sequence having at least 90% identity, at least 95% identity, or 100% identity to any one of SEQ ID NOs:53, 61, 647, 683, 773 and 845; and VH4 comprises a CDR1 comprising an amino acid sequence having at least 90% identity, at least 95% identity, or 100% identity to any one of SEQ ID NOs:48, 56, 649, 685, 775 and 847; a CDR2 comprising an amino acid sequence having at least 90% identity, at least 95% identity, or 100% identity to any one of SEQ ID NOs:49, 57, 650, 686, 776 and 848; and a CDR3 comprising an amino acid sequence having at least 90% identity, at least 95% identity, or 100% identity to any one of SEQ ID NOs:50, 58, 651, 687, 777 and 849. In some aspects, VL4 comprises an amino acid sequence having at least 80%, at least 85%, at least 90%, at least 95%, or 100% identity to any one of SEQ ID NOs:55, 63, 527, 644, 680, 770 and 842; and VH4 comprises an amino acid sequence having at least 80%, at least 85%, at least 90%, at least 95%, or 100% identity to any one of SEQ ID NOs:54, 62, 528, 648, 684, 774 and 846.

[0161] In some aspects, the invention is directed to an antigen binding polypeptide complex comprising a first polypeptide, a second polypeptide, and a third polypeptide; wherein the first polypeptide has a structure represented by VL1-L1-VH1-L2-Fc; or VH1-L3-VL1-L4-Fc; wherein the second polypeptide has a structure represented by VH2-L5-VH3-L6-CH1-L7-Fc; wherein the third polypeptide has a structure represented by VL2-L8-VL3-L9-CL; wherein VL1 is a first immunoglobulin light chain variable region that specifically binds to a TAA; VL2 is a second immunoglobulin light chain variable region that specifically binds to a TAA; VL3 is a third immunoglobulin light chain variable region that specifically binds to human CD3; VH1 is a first immunoglobulin heavy chain variable region that specifically binds to a TAA; VH2 is a second immunoglobulin heavy chain variable region that specifically binds to a TAA; VH3 is a third immunoglobulin heavy chain variable region that specifically binds to human CD3; Fc is a region comprising an immunoglobulin heavy chain constant region 2 (CH2), an immunoglobulin heavy chain constant region 3 (CH3), and optionally, an immunoglobulin hinge; CH1 is an immunoglobulin heavy chain constant region 1; CL is an immunoglobulin light chain constant region; and L1-L9 are amino acid linkers. In some aspects, the TAA bound by VL1 and VH1 is CD19 and the TAA bound by VL2 and VH2 is CD20. In some aspects, the TAA bound by VL1 and VH1 is CD20 and the TAA bound by VL2 and VH2 is CD19. In some aspects, the TAA bound by VL1 and VH1 is cMet and the TAA bound by VL2 and VH2 is Trop2. In some aspects, the TAA bound by VL1 and VH1 is Trop2 and the TAA bound by VL2 and VH2 is cMet.

[0162] In some aspects, the invention is directed to an antigen binding polypeptide complex comprising a first polypeptide, a second polypeptide, and a third polypeptide; wherein the first polypeptide has a structure represented by VL1-L1-VH1-L2-Fc; or VH1-L3-VL1-L4-Fc; wherein the second polypeptide has a structure represented by VH2-L5-VH3-L6-CH1-L7-Fc; wherein the third polypeptide has a structure represented by VL2-L8-VL3-L9-CL; wherein VL1 is a first immunoglobulin light chain variable region that specifically binds to an immune stimulating receptor; VL2 is a second immunoglobulin light chain variable region that specifically binds to a TAA; VL3 is a third immunoglobulin light chain variable region that specifically binds to human CD3; VH1 is a first immunoglobulin heavy chain variable region that specifically binds to an immune stimulating receptor; VH2 is a second immunoglobulin heavy chain variable region that specifically binds to a TAA; VH3 is a third immunoglobulin heavy chain variable region that specifically binds to human CD3; Fc is a region comprising an immunoglobulin heavy chain constant region 2 (CH2), an immunoglobulin heavy chain constant region 3 (CH3), and optionally, an immunoglobulin hinge; CH1 is an immunoglobulin heavy chain constant region 1; CL is an immunoglobulin light chain constant region; and L1-L9 are amino acid linkers. In some aspects, the immune stimulating receptor bound by VL1 and VH1 is CD28 and/or the TAA bound by VL2 and VH2 is CD19. In some aspects, the immune stimulating receptor bound by VL1 and VH1 is CD28 and/or the TAA bound by VL2 and VH2 is CD20. In some aspects, the immune stimulating receptor bound by VL1 and VH1 is CD28 and/or the TAA bound by VL2 and VH2 is cMet. In some aspects, the immune stimulating receptor bound by VL1 and VH1 is CD28 and/or the TAA bound by VL2 and VH2 is Trop2.

[0163] In some aspects, the invention is directed to an antigen binding polypeptide complex comprising a first polypeptide, a second polypeptide, and a third polypeptide; wherein the first polypeptide has a structure represented by VL1-L1-VH1-L2-Fc; or VH1-L3-VL1-L4-Fc; wherein the second polypeptide has a structure represented by VH2-L5-VH3-L6-CH1-L7-Fc; wherein the third polypeptide has a structure represented by VL2-L8-VL3-L9-CL; wherein VL1 is a first immunoglobulin light chain variable region that specifically binds to CD28; VL2 is a second immunoglobulin light chain variable region that specifically binds to a TAA; VL3 is a third immunoglobulin light chain variable region that specifically binds to human CD3; VH1 is a first immunoglobulin heavy chain variable region that specifically binds to a CD28; VH2 is a second immunoglobulin heavy chain variable region that specifically binds to a TAA; VH3 is a third immunoglobulin heavy chain variable region that specifically binds to human CD3; Fc is a region comprising an immunoglobulin heavy chain constant region 2 (CH2), an immunoglobulin heavy chain constant region 3 (CH3), and optionally, an immunoglobulin hinge; CH1 is an immunoglobulin heavy chain constant region 1; CL is an immunoglobulin light chain constant region; and L1-L9 are amino acid linkers. In some aspects, VL2 and VH2 specifically binds to CD19. In some aspects, VL2 and VH2 specifically binds to CD20. In some aspects, VL2 and VH2 specifically binds to cMet. In some aspects, VL2 and VH2 specifically binds to Trop2.

[0164] In some aspects, the invention is directed to an antigen binding polypeptide complex comprising a first polypeptide, a second polypeptide, and a third polypeptide; wherein the first polypeptide has a structure represented by VL1-L1-VH1-L2-Fc; or VH1-L3-VL1-L4-Fc; wherein the second polypeptide has a structure represented by VH2-L5-VH3-L6-CH1-L7-Fc; wherein the third polypeptide has a structure represented by VL2-L8-VL3-L9-CL; wherein VL1 is a first immunoglobulin light chain variable region that specifically binds to a TAA; VL2 is a second immunoglobulin light chain variable region that specifically binds to an immune stimulating receptor; VL3 is a third immunoglobulin light chain variable region that specifically binds to human CD3; VH1 is a first immunoglobulin heavy chain variable region that specifically binds to a TAA; VH2 is a second immunoglobulin heavy chain variable region that specifically binds to an immune stimulating receptor; VH3 is a third immunoglobulin heavy chain variable region that specifically binds to human CD3; Fc is a region comprising an immunoglobulin heavy chain constant region 2 (CH2), an immunoglobulin heavy chain constant region 3 (CH3), and optionally, an immunoglobulin hinge; CH1 is an immunoglobulin heavy chain constant region 1; CL is an immunoglobulin light chain constant region; and L1-L9 are amino acid linkers. In some aspects, the TAA bound by VL1 and VH1 is CD19 and/or the immune stimulating receptor bound by VL2 and VH2 is CD28. In some aspects, the TAA bound by VL1 and VH1 is CD20 and/or the immune stimulating receptor bound by VL2 and VH2 is CD28. In some aspects, the TAA bound by VL1 and VH1 is cMet and/or the immune stimulating receptor bound by VL2 and VH2 is CD28. In some aspects, the TAA bound by VL1 and VH1 is Trop2 and/or the immune stimulating receptor bound by VL2 and VH2 is CD28.

[0165] In some aspects, the invention is directed to an antigen binding polypeptide complex comprising a first polypeptide, a second polypeptide, and a third polypeptide; wherein the first polypeptide has a structure represented by VL1-L1-VH1-L2-Fc; or VH1-L3-VL1-L4-Fc; wherein the second polypeptide has a structure represented by VH2-L5-VH3-L6-CH1-L7-Fc; wherein the third polypeptide has a structure represented by VL2-L8-VL3-L9-CL; wherein VL1 is a first immunoglobulin light chain variable region that specifically binds to a TAA; VL2 is a second immunoglobulin light chain variable region that specifically binds to CD28; VL3 is a third immunoglobulin light chain variable region that specifically binds to human CD3; VH1 is a first immunoglobulin heavy chain variable region that specifically binds to a TAA; VH2 is a second immunoglobulin heavy chain variable region that specifically binds to CD28; VH3 is a third immunoglobulin heavy chain variable region that specifically binds to human CD3; Fc is a region comprising an immunoglobulin heavy chain constant region 2 (CH2), an immunoglobulin heavy chain constant region 3 (CH3), and optionally, an immunoglobulin hinge; CH1 is an immunoglobulin heavy chain constant region 1; CL is an immunoglobulin light chain constant region; and L1-L9 are amino acid linkers. In some aspects, VL1 and VH1 specifically binds to CD19. In some aspects, VL1 and VH1 specifically binds to CD20. In some aspects, VL1 and VH1 specifically binds to cMet. In some aspects, VL1 and VH1 specifically binds to Trop2.

[0166] In some aspects, the invention is directed to an antigen binding polypeptide complex comprising a first polypeptide, a second polypeptide, a third polypeptide, and a fourth polypeptide; wherein the first polypeptide has a structure represented by VL1-L1-CL; wherein the second polypeptide has a structure represented by VH1-L2-CH1-L3-Fc; wherein the third polypeptide has a structure represented by VH2-L4-VH3-L5-CH1-L6-Fc; wherein the fourth polypeptide has a structure represented by VL2-L7-VL3-L8-CL; wherein VL1 is a first immunoglobulin light chain variable region that specifically binds to a TAA; VL2 is a second immunoglobulin light chain variable region that specifically binds to a TAA; VL3 is a third immunoglobulin light chain variable region that specifically binds to human CD3; VH1 is a first immunoglobulin heavy chain variable region that specifically binds to a TAA; VH2 is a second immunoglobulin heavy chain variable region that specifically binds to a TAA; VH3 is a third immunoglobulin heavy chain variable region that specifically binds to human CD3; Fc is a region comprising an immunoglobulin heavy chain constant region 2 (CH2), an immunoglobulin heavy chain constant region 3 (CH3), and optionally, an immunoglobulin hinge; CH1 is an immunoglobulin heavy chain constant region 1; CL is an immunoglobulin light chain constant region; and L1-L8 are amino acid linkers. In some aspects, the TAA bound by VL1 and VH1 is CD19 and the TAA bound by VL2 and VH2 is CD20. In some aspects, the TAA bound by VL1 and VH1 is CD20 and the TAA bound by VL2 and VH2 is CD19. In some aspects, the TAA bound by VL1 and VH1 is cMet and the TAA bound by VL2 and VH2 is Trop2. In some aspects, the TAA bound by VL1 and VH1 is Trop2 and the TAA bound by VL2 and VH2 is cMet.

[0167] In some aspects, the invention is directed to an antigen binding polypeptide complex comprising a first polypeptide, a second polypeptide, a third polypeptide, and a fourth polypeptide; wherein the first polypeptide has a structure represented by VL1-L1-CL; wherein the second polypeptide has a structure represented by VH1-L2-CH1-L3-Fc; wherein the third polypeptide has a structure represented by VH2-L4-VH3-L5-CH1-L6-Fc; wherein the fourth polypeptide has a structure represented by VL2-L7-VL3-L8-CL; wherein VL1 is a first immunoglobulin light chain variable region that specifically binds to an immune stimulating receptor; VL2 is a second immunoglobulin light chain variable region that specifically binds to a TAA; VL3 is a third immunoglobulin light chain variable region that specifically binds to human CD3; VH1 is a first immunoglobulin heavy chain variable region that specifically binds to an immune stimulating receptor; VH2 is a second immunoglobulin heavy chain variable region that specifically binds to a TAA; VH3 is a third immunoglobulin heavy chain variable region that specifically binds to human CD3; Fc is a region comprising an immunoglobulin heavy chain constant region 2 (CH2), an immunoglobulin heavy chain constant region 3 (CH3), and optionally, an immunoglobulin hinge; CH1 is an immunoglobulin heavy chain constant region 1; CL is an immunoglobulin light chain constant region; and L1-L8 are amino acid linkers. In some aspects, the immune stimulating receptor bound by VL1 and VH1 is CD28 and/or the TAA bound by VL2 and VH2 is CD19. In some aspects, the immune stimulating receptor bound by VL1 and VH1 is CD28 and/or the TAA bound by VL2 and VH2 is CD20. In some aspects, the immune stimulating receptor bound by VL1 and VH1 is CD28 and/or the TAA bound by VL2 and VH2 is cMet. In some aspects, the immune stimulating receptor bound by VL1 and VH1 is CD28 and/or the TAA bound by VL2 and VH2 is Trop2.

[0168] In some aspects, the invention is directed to an antigen binding polypeptide complex comprising a first polypeptide, a second polypeptide, a third polypeptide, and a fourth polypeptide; wherein the first polypeptide has a structure represented by VL1-L1-CL; wherein the second polypeptide has a structure represented by VH1-L2-CH1-L3-Fc; wherein the third polypeptide has a structure represented by VH2-L4-VH3-L5-CH1-L6-Fc; wherein the fourth polypeptide has a structure represented by VL2-L7-VL3-L8-CL; wherein VL1 is a first immunoglobulin light chain variable region that specifically binds to CD28; VL2 is a second immunoglobulin light chain variable region that specifically binds to a TAA; VL3 is a third immunoglobulin light chain variable region that specifically binds to human CD3; VH1 is a first immunoglobulin heavy chain variable region that specifically binds to CD28; VH2 is a second immunoglobulin heavy chain variable region that specifically binds to a TAA; VH3 is a third immunoglobulin heavy chain variable region that specifically binds to human CD3; Fc is a region comprising an immunoglobulin heavy chain constant region 2 (CH2), an immunoglobulin heavy chain constant region 3 (CH3), and optionally, an immunoglobulin hinge; CH1 is an immunoglobulin heavy chain constant region 1; CL is an immunoglobulin light chain constant region; and L1-L8 are amino acid linkers. In some aspects, VL2 and VH2 specifically binds to CD19. In some aspects, VL2 and VH2 specifically binds to CD20. In some aspects, VL2 and VH2 specifically binds to cMet. In some aspects, VL2 and VH2 specifically binds to Trop2.

[0169] In some aspects, the invention is directed to an antigen binding polypeptide complex comprising a first polypeptide, a second polypeptide, a third polypeptide, and a fourth polypeptide; wherein the first polypeptide has a structure represented by VL1-L1-CL; wherein the second polypeptide has a structure represented by VH1-L2-CH1-L3-Fc; wherein the third polypeptide has a structure represented by VH2-L4-VH3-L5-CH1-L6-Fc; wherein the fourth polypeptide has a structure represented by VL2-L7-VL3-L8-CL; wherein VL1 is a first immunoglobulin light chain variable region that specifically binds to a TAA; VL2 is a second immunoglobulin light chain variable region that specifically binds to an immune stimulating receptor; VL3 is a third immunoglobulin light chain variable region that specifically binds to human CD3; VH1 is a first immunoglobulin heavy chain variable region that specifically binds to a TAA; VH2 is a second immunoglobulin heavy chain variable region that specifically binds to an immune stimulating receptor; VH3 is a third immunoglobulin heavy chain variable region that specifically binds to human CD3; Fc is a region comprising an immunoglobulin heavy chain constant region 2 (CH2), an immunoglobulin heavy chain constant region 3 (CH3), and optionally, an immunoglobulin hinge; CH1 is an immunoglobulin heavy chain constant region 1; CL is an immunoglobulin light chain constant region; and L1-L8 are amino acid linkers. In some aspects, the TAA bound by VL1 and VH1 is CD19 and/or the immune stimulating receptor bound by VL2 and VH2 is CD28. In some aspects, the TAA bound by VL1 and VH1 is CD20 and/or the immune stimulating receptor bound by VL2 and VH2 is CD28. In some aspects, the TAA bound by VL1 and VH1 is cMet and/or the immune stimulating receptor bound by VL2 and VH2 is CD28. In some aspects, the TAA bound by VL1 and VH1 is Trop2 and/or the immune stimulating receptor bound by VL2 and VH2 is CD28.

[0170] In some aspects, the invention is directed to an antigen binding polypeptide complex comprising a first polypeptide, a second polypeptide, a third polypeptide, and a fourth polypeptide; wherein the first polypeptide has a structure represented by VL1-L1-CL; wherein the second polypeptide has a structure represented by VH1-L2-CH1-L3-Fc; wherein the third polypeptide has a structure represented by VH2-L4-VH3-L5-CH1-L6-Fc; wherein the fourth polypeptide has a structure represented by VL2-L7-VL3-L8-CL; wherein VL1 is a first immunoglobulin light chain variable region that specifically binds to a TAA; VL2 is a second immunoglobulin light chain variable region that specifically binds to CD28; VL3 is a third immunoglobulin light chain variable region that specifically binds to human CD3; VH1 is a first immunoglobulin heavy chain variable region that specifically binds to a TAA; VH2 is a second immunoglobulin heavy chain variable region that specifically binds to CD28; VH3 is a third immunoglobulin heavy chain variable region that specifically binds to human CD3; Fc is a region comprising an immunoglobulin heavy chain constant region 2 (CH2), an immunoglobulin heavy chain constant region 3 (CH3), and optionally, an immunoglobulin hinge; CH1 is an immunoglobulin heavy chain constant region 1; CL is an immunoglobulin light chain constant region; and L1-L8 are amino acid linkers. In some aspects, VL1 and VH1 specifically binds to CD19. In some aspects, VL1 and VH1 specifically binds to CD20. In some aspects, VL1 and VH1 specifically binds to cMet. In some aspects, VL1 and VH1 specifically binds to Trop2.

[0171] In some aspects, the invention is directed to an antigen binding polypeptide complex comprising a first polypeptide, a second polypeptide, and a third polypeptide; wherein the first polypeptide has a structure represented by VL1-L1-VL2-L2-VH2-L3-VH1-L4-Fc; or VH1-L5-VH2-L6-VL2-L7-VL1-L8-Fc; wherein the second polypeptide has a structure represented by VH3-L9-VH4-L10-CH1-L11-Fc; wherein the third polypeptide has a structure represented by VL3-L12-VL4-L13-CL; wherein VL1 is a first immunoglobulin light chain variable region that specifically binds to a TAA; VL2 is a second immunoglobulin light chain variable region that specifically binds to a TAA; VL3 is a third immunoglobulin light chain variable region that specifically binds to CD28; VL4 is a fourth immunoglobulin light chain variable region that specifically binds to human CD3; VH1 is a first immunoglobulin heavy chain variable region that specifically binds to a TAA; VH2 is a second immunoglobulin heavy chain variable region that specifically binds to a TAA; VH3 is a third immunoglobulin heavy chain variable region that specifically binds to CD28; VH4 is a fourth immunoglobulin heavy chain variable region that specifically binds to human CD3; Fc is a region comprising an immunoglobulin heavy chain constant region 2 (CH2), an immunoglobulin heavy chain constant region 3 (CH3), and optionally, an immunoglobulin hinge; CH1 is an immunoglobulin heavy chain constant region 1; CL is an immunoglobulin light chain constant region; and L1-L13 are amino acid linkers. In some aspects, the invention is directed to an antigen binding polypeptide complex comprising a first polypeptide, a second polypeptide, and a third polypeptide; wherein the first polypeptide has a structure represented by VL1-L1-VL2-L2-VH2-L3-VH1-L4-Fc; or VH1-L5-VL2-L6-VH2-L7-VL1-L8-Fc; wherein the second polypeptide has a structure represented by VH3-L9-VH4-L10-CH1-L11-Fc; wherein the third polypeptide has a structure represented by VL3-L12-VL4-L13-CL; wherein VL1 is a first immunoglobulin light chain variable region that specifically binds to a TAA; VL2 is a second immunoglobulin light chain variable region that specifically binds to a TAA; VL3 is a third immunoglobulin light chain variable region that specifically binds to CD28; VL4 is a fourth immunoglobulin light chain variable region that specifically binds to human CD3; VH1 is a first immunoglobulin heavy chain variable region that specifically binds to a TAA; VH2 is a second immunoglobulin heavy chain variable region that specifically binds to a TAA; VH3 is a third immunoglobulin heavy chain variable region that specifically binds to CD28; VH4 is a fourth immunoglobulin heavy chain variable region that specifically binds to human CD3; Fc is a region comprising an immunoglobulin heavy chain constant region 2 (CH2), an immunoglobulin heavy chain constant region 3 (CH3), and optionally, an immunoglobulin hinge; CH1 is an immunoglobulin heavy chain constant region 1; CL is an immunoglobulin light chain constant region; and L1-L13 are amino acid linkers. In some aspects, the first polypeptide has a structure represented by VL1-L1-VL2-L2-VH2-L3-VH1-L4-Fc; the second polypeptide has a structure represented by VH3-L9-VH4-L10-CH1-L11-Fc; and the third polypeptide has a structure represented by VL3-L12-VL4-L13-CL. In some aspects, the first polypeptide has a structure represented by VH1-L5-VL2-L6-VH2-L7-VL1-L8-Fc; the second polypeptide has a structure represented by VH3-L9-VH4-L10-CH1-L11-Fc; and the third polypeptide has a structure represented by VL3-L12-VL4-L13-CL. In some aspects, the TAA bound by VL1 and VH1 is CD19 and the TAA bound by VL2 and VH2 is CD20. In some aspects, the TAA bound by VL1 and VH1 is CD20 and the TAA bound by VL2 and VH2 is CD19. In some aspects, the TAA bound by VL1 and VH1 is cMet and the TAA bound by VL2 and VH2 is Trop2. In some aspects, the TAA bound by VL1 and VH1 is Trop2 and the TAA bound by VL2 and VH2 is cMet.

[0172] In some aspects, the invention is directed to an antigen binding polypeptide complex comprising a first polypeptide, a second polypeptide, and a third polypeptide; wherein the first polypeptide has a structure represented by VL1-L1-VL2-L2-VH2-L3-VH1-L4-Fc; or VH1-L5-VH2-L6-VL2-L7-VL1-L8-Fc; wherein the second polypeptide has a structure represented by VH3-L9-VH4-CH1-Fc; wherein the third polypeptide has a structure represented by VL3-L10-VL4-CL; wherein VL1 is a first immunoglobulin light chain variable region that specifically binds to a TAA; VL2 is a second immunoglobulin light chain variable region that specifically binds to a TAA; VL3 is a third immunoglobulin light chain variable region that specifically binds to CD28; VL4 is a fourth immunoglobulin light chain variable region that specifically binds to human CD3; VH1 is a first immunoglobulin heavy chain variable region that specifically binds to a TAA; VH2 is a second immunoglobulin heavy chain variable region that specifically binds to a TAA; VH3 is a third immunoglobulin heavy chain variable region that specifically binds to CD28; VH4 is a fourth immunoglobulin heavy chain variable region that specifically binds to human CD3; Fc is a region comprising an immunoglobulin heavy chain constant region 2 (CH2), an immunoglobulin heavy chain constant region 3 (CH3), and optionally, an immunoglobulin hinge; CH1 is an immunoglobulin heavy chain constant region 1; CL is an immunoglobulin light chain constant region; and L1-L10 are amino acid linkers. In some aspects, the invention is directed to an antigen binding polypeptide complex comprising a first polypeptide, a second polypeptide, and a third polypeptide; wherein the first polypeptide has a structure represented by VL1-L1-VL2-L2-VH2-L3-VH1-L4-Fc; or VH1-L5-VL2-L6-VH2-L7-VL1-L8-Fc; wherein the second polypeptide has a structure represented by VH3-L9-VH4-CH1-Fc; wherein the third polypeptide has a structure represented by VL3-L10-VL4-CL; wherein VL1 is a first immunoglobulin light chain variable region that specifically binds to a TAA; VL2 is a second immunoglobulin light chain variable region that specifically binds to a TAA; VL3 is a third immunoglobulin light chain variable region that specifically binds to CD28; VL4 is a fourth immunoglobulin light chain variable region that specifically binds to human CD3; VH1 is a first immunoglobulin heavy chain variable region that specifically binds to a TAA; VH2 is a second immunoglobulin heavy chain variable region that specifically binds to a TAA; VH3 is a third immunoglobulin heavy chain variable region that specifically binds to CD28; VH4 is a fourth immunoglobulin heavy chain variable region that specifically binds to human CD3; Fc is a region comprising an immunoglobulin heavy chain constant region 2 (CH2), an immunoglobulin heavy chain constant region 3 (CH3), and optionally, an immunoglobulin hinge; CH1 is an immunoglobulin heavy chain constant region 1; CL is an immunoglobulin light chain constant region; and L1-L13 are amino acid linkers. In some aspects, the first polypeptide has a structure represented by VL1-L1-VL2-L2-VH2-L3-VH1-L4-Fc; the second polypeptide has a structure represented by VH3-L9-VH4-CH1-Fc; and the third polypeptide has a structure represented by VL3-L10-VL4-CL. In some aspects, the first polypeptide has a structure represented by VH1-L5-VL2-L6-VH2-L7-VL1-L8-Fc; the second polypeptide has a structure represented by VH3-L9-VH4-CH1-Fc; and the third polypeptide has a structure represented by VL3-L10-VL4-CL. In some aspects, the TAA bound by VL1 and VH1 is CD19 and the TAA bound by VL2 and VH2 is CD20. In some aspects, the TAA bound by VL1 and VH1 is CD20 and the TAA bound by VL2 and VH2 is CD19. In some aspects, the TAA bound by VL1 and VH1 is cMet and the TAA bound by VL2 and VH2 is Trop2. In some aspects, the TAA bound by VL1 and VH1 is Trop2 and the TAA bound by VL2 and VH2 is cMet.

[0173] In some aspects, the invention is directed to an antigen binding polypeptide complex comprising a first polypeptide, a second polypeptide, and a third polypeptide; wherein the first polypeptide has a structure represented by VL1-L1-VL2-L2-VH2-L3-VH1-L4-Fc; or VH1-L5-VH2-L6-VL2-L7-VL1-L8-Fc; wherein the second polypeptide has a structure represented by VH3-L9-VH4-L10-CH1-L11-Fc; wherein the third polypeptide has a structure represented by VL3-L12-VL4-L13-CL; wherein VL1 is a first immunoglobulin light chain variable region that specifically binds to an immune stimulating receptor; VL2 is a second immunoglobulin light chain variable region that specifically binds to a TAA; VL3 is a third immunoglobulin light chain variable region that specifically binds to a TAA; VL4 is a fourth immunoglobulin light chain variable region that specifically binds to human CD3; VH1 is a first immunoglobulin heavy chain variable region that specifically binds to an immune stimulating receptor; VH2 is a second immunoglobulin heavy chain variable region that specifically binds to a TAA; VH3 is a third immunoglobulin heavy chain variable region that specifically binds to a TAA; VH4 is a fourth immunoglobulin heavy chain variable region that specifically binds to human CD3; Fc is a region comprising an immunoglobulin heavy chain constant region 2 (CH2), an immunoglobulin heavy chain constant region 3 (CH3), and optionally, an immunoglobulin hinge; CH1 is an immunoglobulin heavy chain constant region 1; CL is an immunoglobulin light chain constant region; and L1-L13 are amino acid linkers. In some aspects, the invention is directed to an antigen binding polypeptide complex comprising a first polypeptide, a second polypeptide, and a third polypeptide; wherein the first polypeptide has a structure represented by VL1-L1-VL2-L2-VH2-L3-VH1-L4-Fc; or VH1-L5-VL2-L6-VH2-L7-VL1-L8-Fc; wherein the second polypeptide has a structure represented by VH3-L9-VH4-L10-CH1-L11-Fc; wherein the third polypeptide has a structure represented by VL3-L12-VL4-L13-CL; wherein VL1 is a first immunoglobulin light chain variable region that specifically binds to an immune stimulating receptor; VL2 is a second immunoglobulin light chain variable region that specifically binds to a TAA; VL3 is a third immunoglobulin light chain variable region that specifically binds to a TAA; VL4 is a fourth immunoglobulin light chain variable region that specifically binds to human CD3; VH1 is a first immunoglobulin heavy chain variable region that specifically binds to an immune stimulating receptor; VH2 is a second immunoglobulin heavy chain variable region that specifically binds to a TAA; VH3 is a third immunoglobulin heavy chain variable region that specifically binds to a TAA; VH4 is a fourth immunoglobulin heavy chain variable region that specifically binds to human CD3; Fc is a region comprising an immunoglobulin heavy chain constant region 2 (CH2), an immunoglobulin heavy chain constant region 3 (CH3), and optionally, an immunoglobulin hinge; CH1 is an immunoglobulin heavy chain constant region 1; CL is an immunoglobulin light chain constant region; and L1-L13 are amino acid linkers. In some aspects, the first polypeptide has a structure represented by VL1-L1-VL2-L2-VH2-L3-VH1-L4-Fc; the second polypeptide has a structure represented by VH3-L9-VH4-L10-CH1-L11-Fc; and the third polypeptide has a structure represented by VL3-L12-VL4-L13-CL. In some aspects, the first polypeptide has a structure represented by VH1-L5-VL2-L6-VH2-L7-VL1-L8-Fc; the second polypeptide has a structure represented by VH3-L9-VH4-L10-CH1-L11-Fc; and the third polypeptide has a structure represented by VL3-L12-VL4-L13-CL. In some aspects, the immune stimulating receptor bound by VL1 and VH1 is CD28, the TAA bound by VL2 and VH2 is CD19 and/or the TAA bound by VL3 and VH3 is CD20. In some aspects, the immune stimulating receptor bound by VL1 and VH1 is CD28, the TAA bound by VL2 and VH2 is CD20 and/or the TAA bound by VL3 and VH3 is CD19. In some aspects, the immune stimulating receptor bound by VL1 and VH1 is CD28, the TAA bound by VL2 and VH2 is cMet and/or the TAA bound by VL3 and VH3 is Trop2. In some aspects, the immune stimulating receptor bound by VL1 and VH1 is CD28, the TAA bound by VL2 and VH2 is Trop2 and/or the TAA bound by VL3 and VH3 is cMet.

[0174] In some other aspects, the invention is directed to an antigen binding polypeptide complex comprising a first polypeptide, a second polypeptide, and a third polypeptide; wherein the first polypeptide has a structure represented by VL1-L1-VL2-L2-VH2-L3-VH1-L4-Fc; or VH1-L5-VH2-L6-VL2-L7-VL1-L8-Fc; wherein the second polypeptide has a structure represented by VH3-L9-VH4-CH1-Fc; wherein the third polypeptide has a structure represented by VL3-L10-VL4-CL; wherein VL1 is a first immunoglobulin light chain variable region that specifically binds to an immune stimulating receptor; VL2 is a second immunoglobulin light chain variable region that specifically binds to a TAA; VL3 is a third immunoglobulin light chain variable region that specifically binds to a TAA; VL4 is a fourth immunoglobulin light chain variable region that specifically binds to human CD3; VH1 is a first immunoglobulin heavy chain variable region that specifically binds to an immune stimulating receptor; VH2 is a second immunoglobulin heavy chain variable region that specifically binds to a TAA; VH3 is a third immunoglobulin heavy chain variable region that specifically binds to a TAA; VH4 is a fourth immunoglobulin heavy chain variable region that specifically binds to human CD3; Fc is a region comprising an immunoglobulin heavy chain constant region 2 (CH2), an immunoglobulin heavy chain constant region 3 (CH3), and optionally, an immunoglobulin hinge; CH1 is an immunoglobulin heavy chain constant region 1; CL is an immunoglobulin light chain constant region; and L1-L13 are amino acid linkers. In some aspects, the invention is directed to an antigen binding polypeptide complex comprising a first polypeptide, a second polypeptide, and a third polypeptide; wherein the first polypeptide has a structure represented by VL1-L1-VL2-L2-VH2-L3-VH1-L4-Fc; or VH1-L5-VL2-L6-VH2-L7-VL1-L8-Fc; wherein the second polypeptide has a structure represented by VH3-L9-VH4-CH1-Fc; wherein the third polypeptide has a structure represented by VL3-L10-VL4-CL; wherein VL1 is a first immunoglobulin light chain variable region that specifically binds to an immune stimulating receptor; VL2 is a second immunoglobulin light chain variable region that specifically binds to a TAA; VL3 is a third immunoglobulin light chain variable region that specifically binds to a TAA; VL4 is a fourth immunoglobulin light chain variable region that specifically binds to human CD3; VH1 is a first immunoglobulin heavy chain variable region that specifically binds to an immune stimulating receptor; VH2 is a second immunoglobulin heavy chain variable region that specifically binds to a TAA; VH3 is a third immunoglobulin heavy chain variable region that specifically binds to a TAA; VH4 is a fourth immunoglobulin heavy chain variable region that specifically binds to human CD3; Fc is a region comprising an immunoglobulin heavy chain constant region 2 (CH2), an immunoglobulin heavy chain constant region 3 (CH3), and optionally, an immunoglobulin hinge; CH1 is an immunoglobulin heavy chain constant region 1; CL is an immunoglobulin light chain constant region; and L1-L10 are amino acid linkers. In some aspects, the first polypeptide has a structure represented by VL1-L1-VL2-L2-VH2-L3-VH1-L4-Fc; the second polypeptide has a structure represented by VH3-L9-VH4-CH1-Fc; and the third polypeptide has a structure represented by VL3-L10-VL4-CL. In some aspects, the first polypeptide has a structure represented by VH1-L5-VL2-L6-VH2-L7-VL1-L8-Fc; the second polypeptide has a structure represented by VH3-L9-VH4-CH1-Fc; and the third polypeptide has a structure represented by VL3-L10-VL4-CL. In some aspects, the immune stimulating receptor bound by VL1 and VH1 is CD28, the TAA bound by VL2 and VH2 is CD19 and/or the TAA bound by VL3 and VH3 is CD20. In some aspects, the immune stimulating receptor bound by VL1 and VH1 is CD28, the TAA bound by VL2 and VH2 is CD20 and/or the TAA bound by VL3 and VH3 is CD19. In some aspects, the immune stimulating receptor bound by VL1 and VH1 is CD28, the TAA bound by VL2 and VH2 is cMet and/or the TAA bound by VL3 and VH3 is Trop2. In some aspects, the immune stimulating receptor bound by VL1 and VH1 is CD28, the TAA bound by VL2 and VH2 is Trop2 and/or the TAA bound by VL3 and VH3 is cMet.

[0175] In some aspects, the invention is directed to an antigen binding polypeptide complex comprising a first polypeptide, a second polypeptide, and a third polypeptide; wherein the first polypeptide has a structure represented by VL1-L1-VL2-L2-VH2-L3-VH1-L4-Fc; or VH1-L5-VH2-L6-VL2-L7-VL1-L8-Fc; wherein the second polypeptide has a structure represented by VH3-L9-VH4-L10-CH1-L11-Fc; wherein the third polypeptide has a structure represented by VL3-L12-VL4-L13-CL; wherein VL1 is a first immunoglobulin light chain variable region that specifically binds to CD28; VL2 is a second immunoglobulin light chain variable region that specifically binds to a TAA; VL3 is a third immunoglobulin light chain variable region that specifically binds to a TAA; VL4 is a fourth immunoglobulin light chain variable region that specifically binds to human CD3; VH1 is a first immunoglobulin heavy chain variable region that specifically binds to CD28; VH2 is a second immunoglobulin heavy chain variable region that specifically binds to a TAA; VH3 is a third immunoglobulin heavy chain variable region that specifically binds to a TAA; VH4 is a fourth immunoglobulin heavy chain variable region that specifically binds to human CD3; Fc is a region comprising an immunoglobulin heavy chain constant region 2 (CH2), an immunoglobulin heavy chain constant region 3 (CH3), and optionally, an immunoglobulin hinge; CH1 is an immunoglobulin heavy chain constant region 1; CL is an immunoglobulin light chain constant region; and L1-L13 are amino acid linkers. In some aspects, the invention is directed to an antigen binding polypeptide complex comprising a first polypeptide, a second polypeptide, and a third polypeptide; wherein the first polypeptide has a structure represented by VL1-L1-VL2-L2-VH2-L3-VH1-L4-Fc; or VH1-L5-VL2-L6-VH2-L7-VL1-L8-Fc; wherein the second polypeptide has a structure represented by VH3-L9-VH4-L10-CH1-L11-Fc; wherein the third polypeptide has a structure represented by VL3-L12-VL4-L13-CL; wherein VL1 is a first immunoglobulin light chain variable region that specifically binds to CD28; VL2 is a second immunoglobulin light chain variable region that specifically binds to a TAA; VL3 is a third immunoglobulin light chain variable region that specifically binds to a TAA; VL4 is a fourth immunoglobulin light chain variable region that specifically binds to human CD3; VH1 is a first immunoglobulin heavy chain variable region that specifically binds to CD28; VH2 is a second immunoglobulin heavy chain variable region that specifically binds to a TAA; VH3 is a third immunoglobulin heavy chain variable region that specifically binds to a TAA; VH4 is a fourth immunoglobulin heavy chain variable region that specifically binds to human CD3; Fc is a region comprising an immunoglobulin heavy chain constant region 2 (CH2), an immunoglobulin heavy chain constant region 3 (CH3), and optionally, an immunoglobulin hinge; CH1 is an immunoglobulin heavy chain constant region 1; CL is an immunoglobulin light chain constant region; and L1-L13 are amino acid linkers. In some aspects, the first polypeptide has a structure represented by VL1-L1-VL2-L2-VH2-L3-VH1-L4-Fc; the second polypeptide has a structure represented by VH3-L9-VH4-L10-CH1-L11-Fc; and the third polypeptide has a structure represented by VL3-L12-VL4-L13-CL. In some aspects, the first polypeptide has a structure represented by VH1-L5-VL2-L6-VH2-L7-VL1-L8-Fc; the second polypeptide has a structure represented by VH3-L9-VH4-L10-CH1-L11-Fc; and the third polypeptide has a structure represented by VL3-L12-VL4-L13-CL. In some aspects, the TAA bound by VL2 and VH2 is CD19 and the TAA bound by VL3 and VH3 is CD20. In some aspects, the TAA bound by VL2 and VH2 is CD20 and the TAA bound by VL3 and VH3 is CD19. In some aspects, the TAA bound by VL2 and VH2 is cMet and the TAA bound by VL3 and VH3 is Trop2. In some aspects, the TAA bound by VL2 and VH2 is Trop2 and the TAA bound by VL3 and VH3 is cMet.

[0176] In other some aspects, the invention is directed to an antigen binding polypeptide complex comprising a first polypeptide, a second polypeptide, and a third polypeptide; wherein the first polypeptide has a structure represented by VL1-L1-VL2-L2-VH2-L3-VH1-L4-Fc; or VH1-L5-VH2-L6-VL2-L7-VL1-L8-Fc; wherein the second polypeptide has a structure represented by VH3-L9-VH4-CH1-Fc; wherein the third polypeptide has a structure represented by VL3-L10-VL4-CL; wherein VL1 is a first immunoglobulin light chain variable region that specifically binds to CD28; VL2 is a second immunoglobulin light chain variable region that specifically binds to a TAA; VL3 is a third immunoglobulin light chain variable region that specifically binds to a TAA; VL4 is a fourth immunoglobulin light chain variable region that specifically binds to human CD3; VH1 is a first immunoglobulin heavy chain variable region that specifically binds to CD28; VH2 is a second immunoglobulin heavy chain variable region that specifically binds to a TAA; VH3 is a third immunoglobulin heavy chain variable region that specifically binds to a TAA; VH4 is a fourth immunoglobulin heavy chain variable region that specifically binds to human CD3; Fc is a region comprising an immunoglobulin heavy chain constant region 2 (CH2), an immunoglobulin heavy chain constant region 3 (CH3), and optionally, an immunoglobulin hinge; CH1 is an immunoglobulin heavy chain constant region 1; CL is an immunoglobulin light chain constant region; and L1-L13 are amino acid linkers. In some aspects, the invention is directed to an antigen binding polypeptide complex comprising a first polypeptide, a second polypeptide, and a third polypeptide; wherein the first polypeptide has a structure represented by VL1-L1-VL2-L2-VH2-L3-VH1-L4-Fc; or VH1-L5-VL2-L6-VH2-L7-VL1-L8-Fc; wherein the second polypeptide has a structure represented by VH3-L9-VH4-CH1-Fc; wherein the third polypeptide has a structure represented by VL3-L10-VL4-CL; wherein VL1 is a first immunoglobulin light chain variable region that specifically binds to CD28; VL2 is a second immunoglobulin light chain variable region that specifically binds to a TAA; VL3 is a third immunoglobulin light chain variable region that specifically binds to a TAA; VL4 is a fourth immunoglobulin light chain variable region that specifically binds to human CD3; VH1 is a first immunoglobulin heavy chain variable region that specifically binds to CD28; VH2 is a second immunoglobulin heavy chain variable region that specifically binds to a TAA; VH3 is a third immunoglobulin heavy chain variable region that specifically binds to a TAA; VH4 is a fourth immunoglobulin heavy chain variable region that specifically binds to human CD3; Fc is a region comprising an immunoglobulin heavy chain constant region 2 (CH2), an immunoglobulin heavy chain constant region 3 (CH3), and optionally, an immunoglobulin hinge; CH1 is an immunoglobulin heavy chain constant region 1; CL is an immunoglobulin light chain constant region; and L1-L13 are amino acid linkers. In some aspects, the first polypeptide has a structure represented by VL1-L1-VL2-L2-VH2-L3-VH1-L4-Fc; the second polypeptide has a structure represented by VH3-L9-VH4-CH1-Fc; and the third polypeptide has a structure represented by VL3-L10-VL4-CL. In some aspects, the first polypeptide has a structure represented by VH1-L5-VL2-L6-VH2-L7-VL1-L8-Fc; the second polypeptide has a structure represented by VH3-L9-VH4-CH1-Fc; and the third polypeptide has a structure represented by VL3-L1-VL4-L13-CL. In some aspects, the TAA bound by VL2 and VH2 is CD19 and the TAA bound by VL3 and VH3 is CD20. In some aspects, the TAA bound by VL2 and VH2 is CD20 and the TAA bound by VL3 and VH3 is CD19. In some aspects, the TAA bound by VL2 and VH2 is cMet and the TAA bound by VL3 and VH3 is Trop2. In some aspects, the TAA bound by VL2 and VH2 is Trop2 and the TAA bound by VL3 and VH3 is cMet.

[0177] In some aspects, the invention is directed to an antigen binding polypeptide complex comprising a first polypeptide, a second polypeptide, and a third polypeptide; wherein the first polypeptide has a structure represented by VL1-L1-VL2-L2-VH2-L3-VH1-L4-Fc; or VH1-L5-VH2-L6-VL2-L7-VL1-L8-Fc; wherein the second polypeptide has a structure represented by VH3-L9-VH4-L10-CH1-L11-Fc; wherein the third polypeptide has a structure represented by VL3-L12-VL4-L13-CL; wherein VL1 is a first immunoglobulin light chain variable region that specifically binds to a TAA; VL2 is a second immunoglobulin light chain variable region that specifically binds to an immune stimulating receptor; VL3 is a third immunoglobulin light chain variable region that specifically binds to a TAA; VL4 is a fourth immunoglobulin light chain variable region that specifically binds to human CD3; VH1 is a first immunoglobulin heavy chain variable region that specifically binds to a TAA; VH2 is a second immunoglobulin heavy chain variable region that specifically binds to an immune stimulating receptor; VH3 is a third immunoglobulin heavy chain variable region that specifically binds to a TAA; VH4 is a fourth immunoglobulin heavy chain variable region that specifically binds to human CD3; Fc is a region comprising an immunoglobulin heavy chain constant region 2 (CH2), an immunoglobulin heavy chain constant region 3 (CH3), and optionally, an immunoglobulin hinge; CH1 is an immunoglobulin heavy chain constant region 1; CL is an immunoglobulin light chain constant region; and L1-L13 are amino acid linkers. In some aspects, the invention is directed to an antigen binding polypeptide complex comprising a first polypeptide, a second polypeptide, and a third polypeptide; wherein the first polypeptide has a structure represented by VL1-L1-VL2-L2-VH2-L3-VH1-L4-Fc; or VH1-L5-VL2-L6-VH2-L7-VL1-L8-Fc; wherein the second polypeptide has a structure represented by VH3-L9-VH4-L10-CH1-L11-Fc; wherein the third polypeptide has a structure represented by VL3-L12-VL4-L13-CL; wherein VL1 is a first immunoglobulin light chain variable region that specifically binds to a TAA; VL2 is a second immunoglobulin light chain variable region that specifically binds to an immune stimulating receptor; VL3 is a third immunoglobulin light chain variable region that specifically binds to a TAA; VL4 is a fourth immunoglobulin light chain variable region that specifically binds to human CD3; VH1 is a first immunoglobulin heavy chain variable region that specifically binds to a TAA; VH2 is a second immunoglobulin heavy chain variable region that specifically binds to an immune stimulating receptor; VH3 is a third immunoglobulin heavy chain variable region that specifically binds to a TAA; VH4 is a fourth immunoglobulin heavy chain variable region that specifically binds to human CD3; Fc is a region comprising an immunoglobulin heavy chain constant region 2 (CH2), an immunoglobulin heavy chain constant region 3 (CH3), and optionally, an immunoglobulin hinge; CH1 is an immunoglobulin heavy chain constant region 1; CL is an immunoglobulin light chain constant region; and L1-L13 are amino acid linkers. In some aspects, the first polypeptide has a structure represented by VL1-L1-VL2-L2-VH2-L3-VH1-L4-Fc; the second polypeptide has a structure represented by VH3-L9-VH4-L10-CH1-L11-Fc; and the third polypeptide has a structure represented by VL3-L12-VL4-L13-CL. In some aspects, the first polypeptide has a structure represented by VH1-L5-VL2-L6-VH2-L7-VL1-L8-Fc; the second polypeptide has a structure represented by VH3-L9-VH4-L10-CH1-L11-Fc; and the third polypeptide has a structure represented by VL3-L12-VL4-L13-CL. In some aspects, the TAA bound by VL1 and VH1 is CD19, the immune stimulating receptor bound by VL2 and VH2 is CD28 and/or the TAA bound by VL3 and VH3 is CD20. In some aspects, the TAA bound by VL1 and VH1 is CD20, the immune stimulating receptor bound by VL2 and VH2 is CD28 and/or the TAA bound by VL3 and VH3 is CD19. In some aspects, the TAA bound by VL1 and VH1 is cMet, the immune stimulating receptor bound by VL2 and VH2 is CD28 and/or the TAA bound by VL3 and VH3 is Trop2. In some aspects, the TAA bound by VL1 and VH1 is Trop2, the immune stimulating receptor bound by VL2 and VH2 is CD28 and/or the TAA bound by VL3 and VH3 is cMet. In some aspects, the the immune stimulating receptor bound by VL2 and VH2 is CD28.

[0178] In some aspects, the invention is directed to an antigen binding polypeptide complex comprising a first polypeptide, a second polypeptide, and a third polypeptide; wherein the first polypeptide has a structure represented by VL1-L1-VL2-L2-VH2-L3-VH1-L4-Fc; or VH1-L5-VH2-L6-VL2-L7-VL1-L8-Fc; wherein the second polypeptide has a structure represented by VH3-L9-VH4-CH1-Fc; wherein the third polypeptide has a structure represented by VL3-L10-VL4-CL; wherein VL1 is a first immunoglobulin light chain variable region that specifically binds to a TAA; VL2 is a second immunoglobulin light chain variable region that specifically binds to an immune stimulating receptor; VL3 is a third immunoglobulin light chain variable region that specifically binds to a TAA; VL4 is a fourth immunoglobulin light chain variable region that specifically binds to human CD3; VH1 is a first immunoglobulin heavy chain variable region that specifically binds to a TAA; VH2 is a second immunoglobulin heavy chain variable region that specifically binds to an immune stimulating receptor; VH3 is a third immunoglobulin heavy chain variable region that specifically binds to a TAA; VH4 is a fourth immunoglobulin heavy chain variable region that specifically binds to human CD3; Fc is a region comprising an immunoglobulin heavy chain constant region 2 (CH2), an immunoglobulin heavy chain constant region 3 (CH3), and optionally, an immunoglobulin hinge; CH1 is an immunoglobulin heavy chain constant region 1; CL is an immunoglobulin light chain constant region; and L1-L10 are amino acid linkers. In some aspects, the invention is directed to an antigen binding polypeptide complex comprising a first polypeptide, a second polypeptide, and a third polypeptide; wherein the first polypeptide has a structure represented by VL1-L1-VL2-L2-VH2-L3-VH1-L4-Fc; or VH1-L5-VL2-L6-VH2-L7-VL1-L8-Fc; wherein the second polypeptide has a structure represented by VH3-L9-VH4-CH1-Fc; wherein the third polypeptide has a structure represented by VL3-L10-VL4-CL; wherein VL1 is a first immunoglobulin light chain variable region that specifically binds to a TAA; VL2 is a second immunoglobulin light chain variable region that specifically binds to an immune stimulating receptor; VL3 is a third immunoglobulin light chain variable region that specifically binds to a TAA; VL4 is a fourth immunoglobulin light chain variable region that specifically binds to human CD3; VH1 is a first immunoglobulin heavy chain variable region that specifically binds to a TAA; VH2 is a second immunoglobulin heavy chain variable region that specifically binds to an immune stimulating receptor; VH3 is a third immunoglobulin heavy chain variable region that specifically binds to a TAA; VH4 is a fourth immunoglobulin heavy chain variable region that specifically binds to human CD3; Fc is a region comprising an immunoglobulin heavy chain constant region 2 (CH2), an immunoglobulin heavy chain constant region 3 (CH3), and optionally, an immunoglobulin hinge; CH1 is an immunoglobulin heavy chain constant region 1; CL is an immunoglobulin light chain constant region; and L1-L10 are amino acid linkers. In some aspects, the first polypeptide has a structure represented by VL1-L1-VL2-L2-VH2-L3-VH1-L4-Fc; the second polypeptide has a structure represented by VH3-L9-VH4-CH1-Fc; and the third polypeptide has a structure represented by VL3-L10-VL4-CL. In some aspects, the first polypeptide has a structure represented by VH1-L5-VL2-L6-VH2-L7-VL1-L8-Fc; the second polypeptide has a structure represented by VH3-L9-VH4-CH1-Fc; and the third polypeptide has a structure represented by VL3-L10-VL4-CL. In some aspects, the TAA bound by VL1 and VH1 is CD19, the immune stimulating receptor bound by VL2 and VH2 is CD28 and/or the TAA bound by VL3 and VH3 is CD20. In some aspects, the TAA bound by VL1 and VH1 is CD20, the immune stimulating receptor bound by VL2 and VH2 is CD28 and/or the TAA bound by VL3 and VH3 is CD19. In some aspects, the TAA bound by VL1 and VH1 is cMet, the immune stimulating receptor bound by VL2 and VH2 is CD28 and/or the TAA bound by VL3 and VH3 is Trop2. In some aspects, the TAA bound by VL1 and VH1 is Trop2, the immune stimulating receptor bound by VL2 and VH2 is CD28 and/or the TAA bound by VL3 and VH3 is cMet. In some aspects, the the immune stimulating receptor bound by VL2 and VH2 is CD28.

[0179] In some aspects, the invention is directed to an antigen binding polypeptide complex comprising a first polypeptide, a second polypeptide, and a third polypeptide; wherein the first polypeptide has a structure represented by VL1-L1-VL2-L2-VH2-L3-VH1-L4-Fc; or VH1-L5-VH2-L6-VL2-L7-VL1-L8-Fc; wherein the second polypeptide has a structure represented by VH3-L9-VH4-L10-CH1-L11-Fc; wherein the third polypeptide has a structure represented by VL3-L12-VL4-L13-CL; wherein VL1 is a first immunoglobulin light chain variable region that specifically binds to a TAA; VL2 is a second immunoglobulin light chain variable region that specifically binds to CD28; VL3 is a third immunoglobulin light chain variable region that specifically binds to a TAA; VL4 is a fourth immunoglobulin light chain variable region that specifically binds to human CD3; VH1 is a first immunoglobulin heavy chain variable region that specifically binds to a TAA; VH2 is a second immunoglobulin heavy chain variable region that specifically binds to CD28; VH3 is a third immunoglobulin heavy chain variable region that specifically binds to a TAA; VH4 is a fourth immunoglobulin heavy chain variable region that specifically binds to human CD3; Fc is a region comprising an immunoglobulin heavy chain constant region 2 (CH2), an immunoglobulin heavy chain constant region 3 (CH3), and optionally, an immunoglobulin hinge; CH1 is an immunoglobulin heavy chain constant region 1; CL is an immunoglobulin light chain constant region; and L1-L13 are amino acid linkers. In some aspects, the invention is directed to an antigen binding polypeptide complex comprising a first polypeptide, a second polypeptide, and a third polypeptide; wherein the first polypeptide has a structure represented by VL1-L1-VL2-L2-VH2-L3-VH1-L4-Fc; or VH1-L5-VL2-L6-VH2-L7-VL1-L8-Fc; wherein the second polypeptide has a structure represented by VH3-L9-VH4-L10-CH1-L11-Fc; wherein the third polypeptide has a structure represented by VL3-L12-VL4-L13-CL; wherein VL1 is a first immunoglobulin light chain variable region that specifically binds to a TAA; VL2 is a second immunoglobulin light chain variable region that specifically binds to CD28; VL3 is a third immunoglobulin light chain variable region that specifically binds to a TAA; VL4 is a fourth immunoglobulin light chain variable region that specifically binds to human CD3; VH1 is a first immunoglobulin heavy chain variable region that specifically binds to a TAA; VH2 is a second immunoglobulin heavy chain variable region that specifically binds to CD28; VH3 is a third immunoglobulin heavy chain variable region that specifically binds to a TAA; VH4 is a fourth immunoglobulin heavy chain variable region that specifically binds to human CD3; Fc is a region comprising an immunoglobulin heavy chain constant region 2 (CH2), an immunoglobulin heavy chain constant region 3 (CH3), and optionally, an immunoglobulin hinge; CH1 is an immunoglobulin heavy chain constant region 1; CL is an immunoglobulin light chain constant region; and L1-L13 are amino acid linkers. In some aspects, the first polypeptide has a structure represented by VL1-L1-VL2-L2-VH2-L3-VH1-L4-Fc; the second polypeptide has a structure represented by VH3-L9-VH4-L10-CH1-L11-Fc; and the third polypeptide has a structure represented by VL3-L12-VL4-L13-CL. In some aspects, the first polypeptide has a structure represented by VH1-L5-VL2-L6-VH2-L7-VL1-L8-Fc; the second polypeptide has a structure represented by VH3-L9-VH4-L10-CH1-L11-Fc; and the third polypeptide has a structure represented by VL3-L12-VL4-L13-CL. In some aspects, the TAA bound by VL1 and VH1 is CD19 and the TAA bound by VL3 and VH3 is CD20. In some aspects, the TAA bound by VL1 and VH1 is CD20 and the TAA bound by VL3 and VH3 is CD19. In some aspects, the TAA bound by VL1 and VH1 is cMet and the TAA bound by VL3 and VH3 is Trop2. In some aspects, the TAA bound by VL1 and VH1 is Trop2 and the TAA bound by VL3 and VH3 is cMet.

[0180] In some aspects, the invention is directed to an antigen binding polypeptide complex comprising a first polypeptide, a second polypeptide, and a third polypeptide; wherein the first polypeptide has a structure represented by VL1-L1-VL2-L2-VH2-L3-VH1-L4-Fc; or VH1-L5-VH2-L6-VL2-L7-VL1-L8-Fc; wherein the second polypeptide has a structure represented by VH3-L9-VH4-CH1-Fc; wherein the third polypeptide has a structure represented by VL3-L10-VL4-CL; wherein VL1 is a first immunoglobulin light chain variable region that specifically binds to a TAA; VL2 is a second immunoglobulin light chain variable region that specifically binds to CD28; VL3 is a third immunoglobulin light chain variable region that specifically binds to a TAA; VL4 is a fourth immunoglobulin light chain variable region that specifically binds to human CD3; VH1 is a first immunoglobulin heavy chain variable region that specifically binds to a TAA; VH2 is a second immunoglobulin heavy chain variable region that specifically binds to CD28; VH3 is a third immunoglobulin heavy chain variable region that specifically binds to a TAA; VH4 is a fourth immunoglobulin heavy chain variable region that specifically binds to human CD3; Fc is a region comprising an immunoglobulin heavy chain constant region 2 (CH2), an immunoglobulin heavy chain constant region 3 (CH3), and optionally, an immunoglobulin hinge; CH1 is an immunoglobulin heavy chain constant region 1; CL is an immunoglobulin light chain constant region; and L1-L10 are amino acid linkers. In some aspects, the invention is directed to an antigen binding polypeptide complex comprising a first polypeptide, a second polypeptide, and a third polypeptide; wherein the first polypeptide has a structure represented by VL1-L1-VL2-L2-VH2-L3-VH1-L4-Fc; or VH1-L5-VL2-L6-VH2-L7-VL1-L8-Fc; wherein the second polypeptide has a structure represented by VH3-L9-VH4-CH1-Fc; wherein the third polypeptide has a structure represented by VL3-L10-VL4-CL; wherein VL1 is a first immunoglobulin light chain variable region that specifically binds to a TAA; VL2 is a second immunoglobulin light chain variable region that specifically binds to CD28; VL3 is a third immunoglobulin light chain variable region that specifically binds to a TAA; VL4 is a fourth immunoglobulin light chain variable region that specifically binds to human CD3; VH1 is a first immunoglobulin heavy chain variable region that specifically binds to a TAA; VH2 is a second immunoglobulin heavy chain variable region that specifically binds to CD28; VH3 is a third immunoglobulin heavy chain variable region that specifically binds to a TAA; VH4 is a fourth immunoglobulin heavy chain variable region that specifically binds to human CD3; Fc is a region comprising an immunoglobulin heavy chain constant region 2 (CH2), an immunoglobulin heavy chain constant region 3 (CH3), and optionally, an immunoglobulin hinge; CH1 is an immunoglobulin heavy chain constant region 1; CL is an immunoglobulin light chain constant region; and L1-L13 are amino acid linkers. In some aspects, the first polypeptide has a structure represented by VL1-L1-VL2-L2-VH2-L3-VH1-L4-Fc; the second polypeptide has a structure represented by VH3-L9-VH4-CH1-Fc; and the third polypeptide has a structure represented by VL3-L10-VL4-CL. In some aspects, the first polypeptide has a structure represented by VH1-L5-VL2-L6-VH2-L7-VL1-L8-Fc; the second polypeptide has a structure represented by VH3-L9-VH4-CH1-Fc; and the third polypeptide has a structure represented by VL3-L10-VL4-CL. In some aspects, the TAA bound by VL1 and VH1 is CD19 and the TAA bound by VL3 and VH3 is CD20. In some aspects, the TAA bound by VL1 and VH1 is CD20 and the TAA bound by VL3 and VH3 is CD19. In some aspects, the TAA bound by VL1 and VH1 is cMet and the TAA bound by VL3 and VH3 is Trop2. In some aspects, the TAA bound by VL1 and VH1 is Trop2 and the TAA bound by VL3 and VH3 is cMet.

[0181] In some aspects, the invention is directed to an antigen binding polypeptide complex comprising a first polypeptide and a second polypeptide; wherein the first polypeptide has a structure represented by VL1-L1-VL2-L2-VH2-L3-VH1-L4-Fc; or VH1-L5-VH2-L6-VL2-L7-VL1-L8-Fc; wherein the second polypeptide has a structure represented by VL3-L9-VL4-L10-VH4-L11-VH3-L12-Fc; or VH3-L13-VH4-L14-VL4-L15-VL3-L16-Fc; wherein VL1 is a first immunoglobulin light chain variable region that specifically binds to A2AR, APRIL, ATPDase, BAFF, BAFFR, BCMA, BlyS, BTK, BTLA, B7DC, B7H1, B7H2, B7H3, B7H4, B7H5, B7H6, B7H7, B7RP1, B7-4, C3, C5, CCL2, CCL3, CCL4, CCL5, CCL7, CCL8, CCL11, CCL15, CCL17, CCL19, CCL20, CCL21, CCL25, CCR3, CCR4, CD16A, CD19, CD20, CD24, CD27, CD28, CD30, CD38, CD39, CD40, CD40L, CD47, CD52, CD70, CD80, CD86, CD123, CD133, CD137, CD137L, CD160, CD272, CEACAM5, CLEC9, CLEC91, CRTH2, CSF-1, CSF-2, CSF-3, CXCL1, CXCL2, CXCL4, CXCL12, CXCL13, CXCR3, cMet, CTLA4, DLL3, DLL4, DNGR-1, E-cadherin, EGFR, ENTPD1, EpCAM, FCER1, FCER1A, FCER2, FGFR, FLAP, FOLH1, Gi24, GITR, GITRL, GPR5, GP100, GPRC5D, HER2, HER3, ICOSL, ICOS, HHLA2, HMGB1, HVEM, IDO, IFNa, IgE, IGF1R, IL2Rbeta, IL1, ILIA, IL1B, IL1F10, IL2, IL4, IL4Ra, IL5, IL5R, IL6, IL7, IL7Ra, IL8, IL9, IL9R, IL10, rhILlO, IL12, IL13, IL13Ra1, IL13Ra2, IL15, IL17, IL17Rb, IL18, IL22, IL23, IL25, IL7, IL33, IL35, ITGB4, ITK, KIR, LAG3, LAMP1, leptin, LPFS2, MHC class II, MUC-1, MUC-16, NCR3LG1, NKG2D, NKp46, NTPDase-1, OX40, OX40L, PD-1, PD-L1, PD-L2, PROM1, S152, SIRPalpha, SISP1, SLC, SPG64, ST2, STEAP1, STEAP2, Syk kinase, STEAP1, TROP2, TACI, TDO, TGFBETA, T14, TIGIT, TIM3, TLR, TLR2, TLR4, TLR5, TLR9, TMEF1, TNFa, TNFRSF7, Tp55, TREM1, TSLP, TSLPR, TWEAK, VEGF, VISTA, Vstm3, or WUCAM; VL2 is a second immunoglobulin light chain variable region that specifically binds to A2AR, APRIL, ATPDase, BAFF, BAFFR, BCMA, BlyS, BTK, BTLA, B7DC, B7H1, B7H2, B7H3, B7H4, B7H5, B7H6, B7H7, B7RP1, B7-4, C3, C5, CCL2, CCL3, CCL4, CCL5, CCL7, CCL8, CCL11, CCL15, CCL17, CCL19, CCL20, CCL21, CCL25, CCR3, CCR4, CD16A, CD19, CD20, CD24, CD27, CD28, CD30, CD38, CD39, CD40, CD40L, CD47, CD52, CD70, CD80, CD86, CD123, CD133, CD137, CD137L, CD160, CD272, CEACAM5, CLEC9, CLEC91, CRTH2, CSF-1, CSF-2, CSF-3, CXCL1, CXCL2, CXCL4, CXCL12, CXCL13, CXCR3, cMet, CTLA4, DLL3, DLL4, DNGR-1, E-cadherin, EGFR, ENTPD1, EpCAM, FCER1, FCER1A, FCER2, FGFR, FLAP, FOLH1, Gi24, GITR, GITRL, GPR5, GP100, GPRC5D, HER2, HER3, ICOSL, ICOS, HHLA2, HMGB1, HVEM, IDO, IFNa, IgE, IGF1R, IL2Rbeta, IL1, ILIA, IL1B, IL1F10, IL2, IL4, IL4Ra, IL5, IL5R, IL6, IL7, IL7Ra, IL8, IL9, IL9R, IL10, rhILlO, IL12, IL13, IL13Ra1, IL13Ra2, IL15, IL17, IL17Rb, IL18, IL22, IL23, IL25, IL7, IL33, IL35, ITGB4, ITK, KIR, LAG3, LAMP1, leptin, LPFS2, MHC class II, MUC-1, MUC-16, NCR3LG1, NKG2D, NKp46, NTPDase-1, OX40, OX40L, PD-1, PD-L1, PD-L2, PROM1, S152, SIRPalpha, SISP1, SLC, SPG64, ST2, STEAP1, STEAP2, Syk kinase, STEAP1, TROP2, TACI, TDO, TGFBETA, T14, TIGIT, TIM3, TLR, TLR2, TLR4, TLR5, TLR9, TMEF1, TNFa, TNFRSF7, Tp55, TREM1, TSLP, TSLPR, TWEAK, VEGF, VISTA, Vstm3, or WUCAM; VL3 is a third immunoglobulin light chain variable region that specifically binds to CD3; VL4 is a fourth immunoglobulin light chain variable region that specifically binds to A2AR, APRIL, ATPDase, BAFF, BAFFR, BCMA, BlyS, BTK, BTLA, B7DC, B7H1, B7H2, B7H3, B7H4, B7H5, B7H6, B7H7, B7RP1, B7-4, C3, C5, CCL2, CCL3, CCL4, CCL5, CCL7, CCL8, CCL11, CCL15, CCL17, CCL19, CCL20, CCL21, CCL25, CCR3, CCR4, CD16A, CD19, CD20, CD24, CD27, CD28, CD30, CD38, CD39, CD40, CD40L, CD47, CD52, CD70, CD80, CD86, CD123, CD133, CD137, CD137L, CD160, CD272, CEACAM5, CLEC9, CLEC91, CRTH2, CSF-1, CSF-2, CSF-3, CXCL1, CXCL2, CXCL4, CXCL12, CXCL13, CXCR3, cMet, CTLA4, DLL3, DLL4, DNGR-1, E-cadherin, EGFR, ENTPD1, EpCAM, FCER1, FCER1A, FCER2, FGFR, FLAP, FOLH1, Gi24, GITR, GITRL, GPR5, GP100, GPRC5D, HER2, HER3, ICOSL, ICOS, HHLA2, HMGB1, HVEM, IDO, IFNa, IgE, IGF1R, IL2Rbeta, IL1, ILIA, IL1B, IL1F10, IL2, IL4, IL4Ra, IL5, IL5R, IL6, IL7, IL7Ra, IL8, IL9, IL9R, IL10, rhILlO, IL12, IL13, IL13Ra1, IL13Ra2, IL15, IL17, IL17Rb, IL18, IL22, IL23, IL25, IL7, IL33, IL35, ITGB4, ITK, KIR, LAG3, LAMP1, leptin, LPFS2, MHC class II, MUC-1, MUC-16, NCR3LG1, NKG2D, NKp46, NTPDase-1, OX40, OX40L, PD-1, PD-L1, PD-L2, PROM1, S152, SIRPalpha, SISP1, SLC, SPG64, ST2, STEAP1, STEAP2, Syk kinase, STEAP1, TROP2, TACI, TDO, TGFBETA, T14, TIGIT, TIM3, TLR, TLR2, TLR4, TLR5, TLR9, TMEF1, TNFa, TNFRSF7, Tp55, TREM1, TSLP, TSLPR, TWEAK, VEGF, VISTA, Vstm3, or WUCAM; VH1 is a first immunoglobulin heavy chain variable region that specifically binds to A2AR, APRIL, ATPDase, BAFF, BAFFR, BCMA, BlyS, BTK, BTLA, B7DC, B7H1, B7H2, B7H3, B7H4, B7H5, B7H6, B7H7, B7RP1, B7-4, C3, C5, CCL2, CCL3, CCL4, CCL5, CCL7, CCL8, CCL11, CCL15, CCL17, CCL19, CCL20, CCL21, CCL25, CCR3, CCR4, CD16A, CD19, CD20, CD24, CD27, CD28, CD30, CD38, CD39, CD40, CD40L, CD47, CD52, CD70, CD80, CD86, CD123, CD133, CD137, CD137L, CD160, CD272, CEACAM5, CLEC9, CLEC91, CRTH2, CSF-1, CSF-2, CSF-3, CXCL1, CXCL2, CXCL4, CXCL12, CXCL13, CXCR3, cMet, CTLA4, DLL3, DLL4, DNGR-1, E-cadherin, EGFR, ENTPD1, EpCAM, FCER1, FCER1A, FCER2, FGFR, FLAP, FOLH1, Gi24, GITR, GITRL, GPR5, GP100, GPRC5D, HER2, HER3, ICOSL, ICOS, HHLA2, HMGB1, HVEM, IDO, IFNa, IgE, IGF1R, IL2Rbeta, IL1, ILIA, IL1B, IL1F10, IL2, IL4, IL4Ra, IL5, IL5R, IL6, IL7, IL7Ra, IL8, IL9, IL9R, IL10, rhILlO, IL12, IL13, IL13Ra1, IL13Ra2, IL15, IL17, IL17Rb, IL18, IL22, IL23, IL25, IL7, IL33, IL35, ITGB4, ITK, KIR, LAG3, LAMP1, leptin, LPFS2, MHC class II, MUC-1, MUC-16, NCR3LG1, NKG2D, NKp46, NTPDase-1, OX40, OX40L, PD-1, PD-L1, PD-L2, PROM1, S152, SIRPalpha, SISP1, SLC, SPG64, ST2, STEAP1, STEAP2, Syk kinase, STEAP1, TROP2, TACI, TDO, TGFBETA, T14, TIGIT, TIM3, TLR, TLR2, TLR4, TLR5, TLR9, TMEF1, TNFa, TNFRSF7, Tp55, TREM1, TSLP, TSLPR, TWEAK, VEGF, VISTA, Vstm3, or WUCAM; VH2 is a second immunoglobulin heavy chain variable region that specifically binds to A2AR, APRIL, ATPDase, BAFF, BAFFR, BCMA, BlyS, BTK, BTLA, B7DC, B7H1, B7H2, B7H3, B7H4, B7H5, B7H6, B7H7, B7RP1, B7-4, C3, C5, CCL2, CCL3, CCL4, CCL5, CCL7, CCL8, CCL11, CCL15, CCL17, CCL19, CCL20, CCL21, CCL25, CCR3, CCR4, CD16A, CD19, CD20, CD24, CD27, CD28, CD30, CD38, CD39, CD40, CD40L, CD47, CD52, CD70, CD80, CD86, CD123, CD133, CD137, CD137L, CD160, CD272, CEACAM5, CLEC9, CLEC91, CRTH2, CSF-1, CSF-2, CSF-3, CXCL1, CXCL2, CXCL4, CXCL12, CXCL13, CXCR3, cMet, CTLA4, DLL3, DLL4, DNGR-1, E-cadherin, EGFR, ENTPD1, EpCAM, FCER1, FCER1A, FCER2, FGFR, FLAP, FOLH1, Gi24, GITR, GITRL, GPR5, GP100, GPRC5D, HER2, HER3, ICOSL, ICOS, HHLA2, HMGB1, HVEM, IDO, IFNa, IgE, IGF1R, IL2Rbeta, IL1, ILIA, IL1B, IL1F10, IL2, IL4, IL4Ra, IL5, IL5R, IL6, IL7, IL7Ra, IL8, IL9, IL9R, IL10, rhILlO, IL12, IL13, IL13Ra1, IL13Ra2, IL15, IL17, IL17Rb, IL18, IL22, IL23, IL25, IL7, IL33, IL35, ITGB4, ITK, KIR, LAG3, LAMP1, leptin, LPFS2, MHC class II, MUC-1, MUC-16, NCR3LG1, NKG2D, NKp46, NTPDase-1, OX40, OX40L, PD-1, PD-L1, PD-L2, PROM1, S152, SIRPalpha, SISP1, SLC, SPG64, ST2, STEAP1, STEAP2, Syk kinase, STEAP1, TROP2, TACI, TDO, TGFBETA, T14, TIGIT, TIM3, TLR, TLR2, TLR4, TLR5, TLR9, TMEF1, TNFa, TNFRSF7, Tp55, TREM1, TSLP, TSLPR, TWEAK, VEGF, VISTA, Vstm3, or WUCAM; VH3 is a third immunoglobulin heavy chain variable region that specifically binds to CD3; VH4 is a fourth immunoglobulin heavy chain variable region that specifically binds to A2AR, APRIL, ATPDase, BAFF, BAFFR, BCMA, BlyS, BTK, BTLA, B7DC, B7H1, B7H2, B7H3, B7H4, B7H5, B7H6, B7H7, B7RP1, B7-4, C3, C5, CCL2, CCL3, CCL4, CCL5, CCL7, CCL8, CCL11, CCL15, CCL17, CCL19, CCL20, CCL21, CCL25, CCR3, CCR4, CD16A, CD19, CD20, CD24, CD27, CD28, CD30, CD38, CD39, CD40, CD40L, CD47, CD52, CD70, CD80, CD86, CD123, CD133, CD137, CD137L, CD160, CD272, CEACAM5, CLEC9, CLEC91, CRTH2, CSF-1, CSF-2, CSF-3, CXCL1, CXCL2, CXCL4, CXCL12, CXCL13, CXCR3, cMet, CTLA4, DLL3, DLL4, DNGR-1, E-cadherin, EGFR, ENTPD1, EpCAM, FCER1, FCER1A, FCER2, FGFR, FLAP, FOLH1, Gi24, GITR, GITRL, GPR5, GP100, GPRC5D, HER2, HER3, ICOSL, ICOS, HHLA2, HMGB1, HVEM, IDO, IFNa, IgE, IGF1R, IL2Rbeta, IL1, ILIA, IL1B, IL1F10, IL2, IL4, IL4Ra, IL5, IL5R, IL6, IL7, IL7Ra, IL8, IL9, IL9R, IL10, rhILlO, IL12, IL13, IL13Ra1, IL13Ra2, IL15, IL17, IL17Rb, IL18, IL22, IL23, IL25, IL7, IL33, IL35, ITGB4, ITK, KIR, LAG3, LAMP1, leptin, LPFS2, MHC class II, MUC-1, MUC-16, NCR3LG1, NKG2D, NKp46, NTPDase-1, OX40, OX40L, PD-1, PD-L1, PD-L2, PROM1, S152, SIRPalpha, SISP1, SLC, SPG64, ST2, STEAP1, STEAP2, Syk kinase, STEAP1, TROP2, TACI, TDO, TGFBETA, T14, TIGIT, TIM3, TLR, TLR2, TLR4, TLR5, TLR9, TMEF1, TNFa, TNFRSF7, Tp55, TREM1, TSLP, TSLPR, TWEAK, VEGF, VISTA, Vstm3, or WUCAM; Fe is a region comprising an immunoglobulin heavy chain constant region 2 (CH2), an immunoglobulin heavy chain constant region 3 (CH3), and optionally, an immunoglobulin hinge; and L1-L16 are amino acid linkers. In some aspects, the first polypeptide has a structure represented by VL1-L1-VL2-L2-VH2-L3-VH1-L4-Fc and the second polypeptide has a structure represented by VL3-L9-VL4-L10-VH4-L11-VH3-L12-Fc. In some aspects, the first polypeptide has a structure represented by VL1-L1-VL2-L2-VH2-L3-VH1-L4-Fc and the second polypeptide has a structure represented by VH3-L13-VH4-L14-VL4-L15-VL3-L16-Fc. In some aspects, the first polypeptide has a structure represented by VH1-L5-VH2-L6-VL2-L7-VL1-L8-Fc and the second polypeptide has a structure represented by VL3-L9-VL4-L10-VH4-L11-VH3-L12-Fc. In some aspects, the first polypeptide has a structure represented by VH1-L5-VH2-L6-VL2-L7-VL1-L8-Fc and the second polypeptide has a structure represented by VH3-L13-VH4-L14-VL4-L15-VL3-L16-Fc. In some aspects, VL1 and VH1 may specifically bind to A2AR, APRIL, ATPDase, BAFF, BAFFR, BCMA, BlyS, BTK, BTLA, B7DC, B7H1, B7H2, B7H3, B7H4, B7H5, B7H6, B7H7, B7RP1, B7-4, C3, C5, CCL2, CCL3, CCL4, CCL5, CCL7, CCL8, CCL11, CCL15, CCL17, CCL19, CCL20, CCL21, CCL25, CCR3, CCR4, CD16A, CD19, CD20, CD24, CD27, CD28, CD30, CD38, CD39, CD40, CD40L, CD47, CD52, CD70, CD80, CD86, CD123, CD133, CD137, CD137L, CD160, CD272, CEACAM5, CLEC9, CLEC91, CRTH2, CSF-1, CSF-2, CSF-3, CXCL1, CXCL2, CXCL4, CXCL12, CXCL13, CXCR3, cMet, CTLA4, DLL3, DLL4, DNGR-1, E-cadherin, EGFR, ENTPD1, EpCAM, FCER1, FCER1A, FCER2, FGFR, FLAP, FOLH1, Gi24, GITR, GITRL, GPR5, GP100, GPRC5D, HER2, HER3, ICOSL, ICOS, HHLA2, HMGB1, HVEM, IDO, IFNa, IgE, IGF1R, IL2Rbeta, IL1, ILIA, IL1B, IL1F10, IL2, IL4, IL4Ra, IL5, IL5R, IL6, IL7, IL7Ra, IL8, IL9, IL9R, IL10, rhILlO, IL12, IL13, IL13Ra1, IL13Ra2, IL15, IL17, IL17Rb, IL18, IL22, IL23, IL25, IL7, IL33, IL35, ITGB4, ITK, KIR, LAG3, LAMP1, leptin, LPFS2, MHC class II, MUC-1, MUC-16, NCR3LG1, NKG2D, NKp46, NTPDase-1, OX40, OX40L, PD-1, PD-L1, PD-L2, PROM1, S152, SIRPalpha, SISP1, SLC, SPG64, ST2, STEAP1, STEAP2, Syk kinase, STEAP1, TROP2, TACI, TDO, TGFBETA, T14, TIGIT, TIM3, TLR, TLR2, TLR4, TLR5, TLR9, TMEF1, TNFa, TNFRSF7, Tp55, TREM1, TSLP, TSLPR, TWEAK, VEGF, VISTA, Vstm3, or WUCAM. In some aspects, VL2 and VH2 may specifically bind to A2AR, APRIL, ATPDase, BAFF, BAFFR, BCMA, BlyS, BTK, BTLA, B7DC, B7H1, B7H2, B7H3, B7H4, B7H5, B7H6, B7H7, B7RP1, B7-4, C3, C5, CCL2, CCL3, CCL4, CCL5, CCL7, CCL8, CCL11, CCL15, CCL17, CCL19, CCL20, CCL21, CCL25, CCR3, CCR4, CD16A, CD19, CD20, CD24, CD27, CD28, CD30, CD38, CD39, CD40, CD40L, CD47, CD52, CD70, CD80, CD86, CD123, CD133, CD137, CD137L, CD160, CD272, CEACAM5, CLEC9, CLEC91, CRTH2, CSF-1, CSF-2, CSF-3, CXCL1, CXCL2, CXCL4, CXCL12, CXCL13, CXCR3, cMet, CTLA4, DLL3, DLL4, DNGR-1, E-cadherin, EGFR, ENTPD1, EpCAM, FCER1, FCER1A, FCER2, FGFR, FLAP, FOLH1, Gi24, GITR, GITRL, GPR5, GP100, GPRC5D, HER2, HER3, ICOSL, ICOS, HHLA2, HMGB1, HVEM, IDO, IFNa, IgE, IGF1R, IL2Rbeta, IL1, ILIA, IL1B, IL1F10, IL2, IL4, IL4Ra, IL5, IL5R, IL6, IL7, IL7Ra, IL8, IL9, IL9R, IL10, rhILlO, IL12, IL13, IL13Ra1, IL13Ra2, IL15, IL17, IL17Rb, IL18, IL22, IL23, IL25, IL7, IL33, IL35, ITGB4, ITK, KIR, LAG3, LAMP1, leptin, LPFS2, MHC class II, MUC-1, MUC-16, NCR3LG1, NKG2D, NKp46, NTPDase-1, OX40, OX40L, PD-1, PD-L1, PD-L2, PROM1, S152, SIRPalpha, SISP1, SLC, SPG64, ST2, STEAP1, STEAP2, Syk kinase, STEAP1, TROP2, TACI, TDO, TGFBETA, T14, TIGIT, TIM3, TLR, TLR2, TLR4, TLR5, TLR9, TMEF1, TNFa, TNFRSF7, Tp55, TREM1, TSLP, TSLPR, TWEAK, VEGF, VISTA, Vstm3, or WUCAM. In some aspects, VL4 and VH4 may specifically bind to A2AR, APRIL, ATPDase, BAFF, BAFFR, BCMA, BlyS, BTK, BTLA, B7DC, B7H1, B7H2, B7H3, B7H4, B7H5, B7H6, B7H7, B7RP1, B7-4, C3, C5, CCL2, CCL3, CCL4, CCL5, CCL7, CCL8, CCL11, CCL15, CCL17, CCL19, CCL20, CCL21, CCL25, CCR3, CCR4, CD16A, CD19, CD20, CD24, CD27, CD28, CD30, CD38, CD39, CD40, CD40L, CD47, CD52, CD70, CD80, CD86, CD123, CD133, CD137, CD137L, CD160, CD272, CEACAM5, CLEC9, CLEC91, CRTH2, CSF-1, CSF-2, CSF-3, CXCL1, CXCL2, CXCL4, CXCL12, CXCL13, CXCR3, cMet, CTLA4, DLL3, DLL4, DNGR-1, E-cadherin, EGFR, ENTPD1, EpCAM, FCER1, FCER1A, FCER2, FGFR, FLAP, FOLH1, Gi24, GITR, GITRL, GPR5, GP100, GPRC5D, HER2, HER3, ICOSL, ICOS, HHLA2, HMGB1, HVEM, IDO, IFNa, IgE, IGF1R, IL2Rbeta, IL1, ILIA, IL1B, IL1F10, IL2, IL4, IL4Ra, IL5, IL5R, IL6, IL7, IL7Ra, IL8, IL9, IL9R, IL10, rhILlO, IL12, IL13, IL13Ra1, IL13Ra2, IL15, IL17, IL17Rb, IL18, IL22, IL23, IL25, IL7, IL33, IL35, ITGB4, ITK, KIR, LAG3, LAMP1, leptin, LPFS2, MHC class II, MUC-1, MUC-16, NCR3LG1, NKG2D, NKp46, NTPDase-1, OX40, OX40L, PD-1, PD-L1, PD-L2, PROM1, S152, SIRPalpha, SISP1, SLC, SPG64, ST2, STEAP1, STEAP2, Syk kinase, STEAP1, TROP2, TACI, TDO, TGFBETA, T14, TIGIT, TIM3, TLR, TLR2, TLR4, TLR5, TLR9, TMEF1, TNFa, TNFRSF7, Tp55, TREM1, TSLP, TSLPR, TWEAK, VEGF, VISTA, Vstm3, or WUCAM. For example, the antigen binding polypeptide complex may specifically bind CD28, CD3, cMet, and Trop2. For example, the antigen binding polypeptide complex may specifically bind CD28, CD3, CD19, and CD20. For example, VL1 and VH1 may specifically bind to CD28. For example, VL2 and VH2 may specifically bind to CD28. For example, VL4 and VH4 may specifically bind to CD28. For example, VL1 and VH1 may specifically bind to cMet. For example, VL2 and VH2 may specifically bind to cMet. For example, VL4 and VH4 may specifically bind to cMet. For example, VL1 and VH1 may specifically bind to Trop2. For example, VL2 and VH2 may specifically bind to Trop2. For example, VL4 and VH4 may specifically bind to Trop2. For example, VL1 and VH1 may specifically bind to CD19. For example, VL2 and VH2 may specifically bind to CD19. For example, VL4 and VH4 may specifically bind to CD19. For example, VL1 and VH1 may specifically bind to CD20. For example, VL2 and VH2 may specifically bind to CD20. For example, VL4 and VH4 may specifically bind to CD20.

[0182] In some aspects, the invention is directed to an antigen binding polypeptide complex comprising a first polypeptide and a second polypeptide; wherein the first polypeptide has a structure represented by VL1-L1-VL2-L2-VH2-L3-VH1-L4-Fc; or VH1-L5-VH2-L6-VL2-L7-VL1-L8-Fc; wherein the second polypeptide has a structure represented by VL3-L9-VL4-L10-VH4-L11-VH3-L12-Fc; or VH3-L13-VH4-L14-VL4-L15-VL3-L16-Fc; wherein VL1 is a first immunoglobulin light chain variable region that specifically binds to CD28; VL2 is a second immunoglobulin light chain variable region that specifically binds to A2AR, APRIL, ATPDase, BAFF, BAFFR, BCMA, BlyS, BTK, BTLA, B7DC, B7H1, B7H2, B7H3, B7H4, B7H5, B7H6, B7H7, B7RP1, B7-4, C3, C5, CCL2, CCL3, CCL4, CCL5, CCL7, CCL8, CCL11, CCL15, CCL17, CCL19, CCL20, CCL21, CCL25, CCR3, CCR4, CD16A, CD19, CD20, CD24, CD27, CD28, CD30, CD38, CD39, CD40, CD40L, CD47, CD52, CD70, CD80, CD86, CD123, CD133, CD137, CD137L, CD160, CD272, CEACAM5, CLEC9, CLEC91, CRTH2, CSF-1, CSF-2, CSF-3, CXCL1, CXCL2, CXCL4, CXCL12, CXCL13, CXCR3, cMet, CTLA4, DLL3, DLL4, DNGR-1, E-cadherin, EGFR, ENTPD1, EpCAM, FCER1, FCER1A, FCER2, FGFR, FLAP, FOLH1, Gi24, GITR, GITRL, GPR5, GP100, GPRC5D, HER2, HER3, ICOSL, ICOS, HHLA2, HMGB1, HVEM, IDO, IFNa, IgE, IGF1R, IL2Rbeta, IL1, ILIA, IL1B, IL1F10, IL2, IL4, IL4Ra, IL5, IL5R, IL6, IL7, IL7Ra, IL8, IL9, IL9R, IL10, rhILlO, IL12, IL13, IL13Ra1, IL13Ra2, IL15, IL17, IL17Rb, IL18, IL22, IL23, IL25, IL7, IL33, IL35, ITGB4, ITK, KIR, LAG3, LAMP1, leptin, LPFS2, MHC class II, MUC-1, MUC-16, NCR3LG1, NKG2D, NKp46, NTPDase-1, OX40, OX40L, PD-1, PD-L1, PD-L2, PROM1, S152, SIRPalpha, SISP1, SLC, SPG64, ST2, STEAP1, STEAP2, Syk kinase, STEAP1, TROP2, TACI, TDO, TGFBETA, T14, TIGIT, TIM3, TLR, TLR2, TLR4, TLR5, TLR9, TMEF1, TNFa, TNFRSF7, Tp55, TREM1, TSLP, TSLPR, TWEAK, VEGF, VISTA, Vstm3, or WUCAM; VL3 is a third immunoglobulin light chain variable region that specifically binds to CD3; VL4 is a fourth immunoglobulin light chain variable region that specifically binds to A2AR, APRIL, ATPDase, BAFF, BAFFR, BCMA, BlyS, BTK, BTLA, B7DC, B7H1, B7H2, B7H3, B7H4, B7H5, B7H6, B7H7, B7RP1, B7-4, C3, C5, CCL2, CCL3, CCL4, CCL5, CCL7, CCL8, CCL11, CCL15, CCL17, CCL19, CCL20, CCL21, CCL25, CCR3, CCR4, CD16A, CD19, CD20, CD24, CD27, CD28, CD30, CD38, CD39, CD40, CD40L, CD47, CD52, CD70, CD80, CD86, CD123, CD133, CD137, CD137L, CD160, CD272, CEACAM5, CLEC9, CLEC91, CRTH2, CSF-1, CSF-2, CSF-3, CXCL1, CXCL2, CXCL4, CXCL12, CXCL13, CXCR3, cMet, CTLA4, DLL3, DLL4, DNGR-1, E-cadherin, EGFR, ENTPD1, EpCAM, FCER1, FCER1A, FCER2, FGFR, FLAP, FOLH1, Gi24, GITR, GITRL, GPR5, GP100, GPRC5D, HER2, HER3, ICOSL, ICOS, HHLA2, HMGB1, HVEM, IDO, IFNa, IgE, IGF1R, IL2Rbeta, IL1, ILIA, IL1B, IL1F10, IL2, IL4, IL4Ra, IL5, IL5R, IL6, IL7, IL7Ra, IL8, IL9, IL9R, IL10, rhILlO, IL12, IL13, IL13Ra1, IL13Ra2, IL15, IL17, IL17Rb, IL18, IL22, IL23, IL25, IL7, IL33, IL35, ITGB4, ITK, KIR, LAG3, LAMP1, leptin, LPFS2, MHC class II, MUC-1, MUC-16, NCR3LG1, NKG2D, NKp46, NTPDase-1, OX40, OX40L, PD-1, PD-L1, PD-L2, PROM1, 5152, SIRPalpha, SISP1, SLC, SPG64, ST2, STEAP1, STEAP2, Syk kinase, STEAP1, TROP2, TACI, TDO, TGFBETA, T14, TIGIT, TIM3, TLR, TLR2, TLR4, TLR5, TLR9, TMEF1, TNFa, TNFRSF7, Tp55, TREM1, TSLP, TSLPR, TWEAK, VEGF, VISTA, Vstm3, or WUCAM; VH1 is a first immunoglobulin heavy chain variable region that specifically binds to CD28; VH2 is a second immunoglobulin heavy chain variable region that specifically binds to A2AR, APRIL, ATPDase, BAFF, BAFFR, BCMA, BlyS, BTK, BTLA, B7DC, B7H1, B7H2, B7H3, B7H4, B7H5, B7H6, B7H7, B7RP1, B7-4, C3, C5, CCL2, CCL3, CCL4, CCL5, CCL7, CCL8, CCL11, CCL15, CCL17, CCL19, CCL20, CCL21, CCL25, CCR3, CCR4, CD16A, CD19, CD20, CD24, CD27, CD28, CD30, CD38, CD39, CD40, CD40L, CD47, CD52, CD70, CD80, CD86, CD123, CD133, CD137, CD137L, CD160, CD272, CEACAM5, CLEC9, CLEC91, CRTH2, CSF-1, CSF-2, CSF-3, CXCL1, CXCL2, CXCL4, CXCL12, CXCL13, CXCR3, cMet, CTLA4, DLL3, DLL4, DNGR-1, E-cadherin, EGFR, ENTPD1, EpCAM, FCER1, FCER1A, FCER2, FGFR, FLAP, FOLH1, Gi24, GITR, GITRL, GPR5, GP100, GPRC5D, HER2, HER3, ICOSL, ICOS, HHLA2, HMGB1, HVEM, IDO, IFNa, IgE, IGF1R, IL2Rbeta, IL1, ILIA, IL1B, IL1F10, IL2, IL4, IL4Ra, IL5, IL5R, IL6, IL7, IL7Ra, IL8, IL9, IL9R, IL10, rhILlO, IL12, IL13, IL13Ra1, IL13Ra2, IL15, IL17, IL17Rb, IL18, IL22, IL23, IL25, IL7, IL33, IL35, ITGB4, ITK, KIR, LAG3, LAMP1, leptin, LPFS2, MHC class II, MUC-1, MUC-16, NCR3LG1, NKG2D, NKp46, NTPDase-1, OX40, OX40L, PD-1, PD-L1, PD-L2, PROM1, S152, SIRPalpha, SISP1, SLC, SPG64, ST2, STEAP1, STEAP2, Syk kinase, STEAP1, TROP2, TACI, TDO, TGFBETA, T14, TIGIT, TIM3, TLR, TLR2, TLR4, TLR5, TLR9, TMEF1, TNFa, TNFRSF7, Tp55, TREM1, TSLP, TSLPR, TWEAK, VEGF, VISTA, Vstm3, or WUCAM; VH3 is a third immunoglobulin heavy chain variable region that specifically binds to CD3; VH4 is a fourth immunoglobulin heavy chain variable region that specifically binds to A2AR, APRIL, ATPDase, BAFF, BAFFR, BCMA, BlyS, BTK, BTLA, B7DC, B7H1, B7H2, B7H3, B7H4, B7H5, B7H6, B7H7, B7RP1, B7-4, C3, C5, CCL2, CCL3, CCL4, CCL5, CCL7, CCL8, CCL11, CCL15, CCL17, CCL19, CCL20, CCL21, CCL25, CCR3, CCR4, CD16A, CD19, CD20, CD24, CD27, CD28, CD30, CD38, CD39, CD40, CD40L, CD47, CD52, CD70, CD80, CD86, CD123, CD133, CD137, CD137L, CD160, CD272, CEACAM5, CLEC9, CLEC91, CRTH2, CSF-1, CSF-2, CSF-3, CXCL1, CXCL2, CXCL4, CXCL12, CXCL13, CXCR3, cMet, CTLA4, DLL3, DLL4, DNGR-1, E-cadherin, EGFR, ENTPD1, EpCAM, FCER1, FCER1A, FCER2, FGFR, FLAP, FOLH1, Gi24, GITR, GITRL, GPR5, GP100, GPRC5D, HER2, HER3, ICOSL, ICOS, HHLA2, HMGB1, HVEM, IDO, IFNa, IgE, IGF1R, IL2Rbeta, IL1, ILIA, IL1B, IL1F10, IL2, IL4, IL4Ra, IL5, IL5R, IL6, IL7, IL7Ra, IL8, IL9, IL9R, IL10, rhILlO, IL12, IL13, IL13Ra1, IL13Ra2, IL15, IL17, IL17Rb, IL18, IL22, IL23, IL25, IL7, IL33, IL35, ITGB4, ITK, KIR, LAG3, LAMP1, leptin, LPFS2, MHC class II, MUC-1, MUC-16, NCR3LG1, NKG2D, NKp46, NTPDase-1, OX40, OX40L, PD-1, PD-L1, PD-L2, PROM1, S152, SIRPalpha, SISP1, SLC, SPG64, ST2, STEAP1, STEAP2, Syk kinase, STEAP1, TROP2, TACI, TDO, TGFBETA, T14, TIGIT, TIM3, TLR, TLR2, TLR4, TLR5, TLR9, TMEF1, TNFa, TNFRSF7, Tp55, TREM1, TSLP, TSLPR, TWEAK, VEGF, VISTA, Vstm3, or WUCAM; Fc is a region comprising an immunoglobulin heavy chain constant region 2 (CH2), an immunoglobulin heavy chain constant region 3 (CH3), and optionally, an immunoglobulin hinge; and L1-L16 are amino acid linkers. In some aspects, the first polypeptide has a structure represented by VL1-L1-VL2-L2-VH2-L3-VH1-L4-Fc and the second polypeptide has a structure represented by VL3-L9-VL4-L10-VH4-L11-VH3-L12-Fc. In some aspects, the first polypeptide has a structure represented by VL1-L1-VL2-L2-VH2-L3-VH1-L4-Fc and the second polypeptide has a structure represented by VH3-L13-VH4-L14-VL4-L15-VL3-L16-Fc. In some aspects, the first polypeptide has a structure represented by VH1-L5-VH2-L6-VL2-L7-VL1-L8-Fc and the second polypeptide has a structure represented by VL3-L9-VL4-L10-VH4-L11-VH3-L12-Fc. In some aspects, the first polypeptide has a structure represented by VH1-L5-VH2-L6-VL2-L7-VL1-L8-Fc and the second polypeptide has a structure represented by VH3-L13-VH4-L14-VL4-L15-VL3-L16-Fc. In some aspects, VL2 and VH2 may specifically bind to A2AR, APRIL, ATPDase, BAFF, BAFFR, BCMA, BlyS, BTK, BTLA, B7DC, B7H1, B7H2, B7H3, B7H4, B7H5, B7H6, B7H7, B7RP1, B7-4, C3, C5, CCL2, CCL3, CCL4, CCL5, CCL7, CCL8, CCL11, CCL15, CCL17, CCL19, CCL20, CCL21, CCL25, CCR3, CCR4, CD16A, CD19, CD20, CD24, CD27, CD28, CD30, CD38, CD39, CD40, CD40L, CD47, CD52, CD70, CD80, CD86, CD123, CD133, CD137, CD137L, CD160, CD272, CEACAM5, CLEC9, CLEC91, CRTH2, CSF-1, CSF-2, CSF-3, CXCL1, CXCL2, CXCL4, CXCL12, CXCL13, CXCR3, cMet, CTLA4, DLL3, DLL4, DNGR-1, E-cadherin, EGFR, ENTPD1, EpCAM, FCER1, FCER1A, FCER2, FGFR, FLAP, FOLH1, Gi24, GITR, GITRL, GPR5, GP100, GPRC5D, HER2, HER3, ICOSL, ICOS, HHLA2, HMGB1, HVEM, IDO, IFNa, IgE, IGF1R, IL2Rbeta, IL1, ILIA, IL1B, IL1F10, IL2, IL4, IL4Ra, IL5, IL5R, IL6, IL7, IL7Ra, IL8, IL9, IL9R, IL10, rhILlO, IL12, IL13, IL13Ra1, IL13Ra2, IL15, IL17, IL17Rb, IL18, IL22, IL23, IL25, IL7, IL33, IL35, ITGB4, ITK, KIR, LAG3, LAMP1, leptin, LPFS2, MHC class II, MUC-1, MUC-16, NCR3LG1, NKG2D, NKp46, NTPDase-1, OX40, OX40L, PD-1, PD-L1, PD-L2, PROM1, S152, SIRPalpha, SISP1, SLC, SPG64, ST2, STEAP1, STEAP2, Syk kinase, STEAP1, TROP2, TACI, TDO, TGFBETA, T14, TIGIT, TIM3, TLR, TLR2, TLR4, TLR5, TLR9, TMEF1, TNFa, TNFRSF7, Tp55, TREM1, TSLP, TSLPR, TWEAK, VEGF, VISTA, Vstm3, or WUCAM. In some aspects, VL4 and VH4 may specifically bind to A2AR, APRIL, ATPDase, BAFF, BAFFR, BCMA, BlyS, BTK, BTLA, B7DC, B7H1, B7H2, B7H3, B7H4, B7H5, B7H6, B7H7, B7RP1, B7-4, C3, C5, CCL2, CCL3, CCL4, CCL5, CCL7, CCL8, CCL11, CCL15, CCL17, CCL19, CCL20, CCL21, CCL25, CCR3, CCR4, CD16A, CD19, CD20, CD24, CD27, CD28, CD30, CD38, CD39, CD40, CD40L, CD47, CD52, CD70, CD80, CD86, CD123, CD133, CD137, CD137L, CD160, CD272, CEACAM5, CLEC9, CLEC91, CRTH2, CSF-1, CSF-2, CSF-3, CXCL1, CXCL2, CXCL4, CXCL12, CXCL13, CXCR3, cMet, CTLA4, DLL3, DLL4, DNGR-1, E-cadherin, EGFR, ENTPD1, EpCAM, FCER1, FCER1A, FCER2, FGFR, FLAP, FOLH1, Gi24, GITR, GITRL, GPR5, GP100, GPRC5D, HER2, HER3, ICOSL, ICOS, HHLA2, HMGB1, HVEM, IDO, IFNa, IgE, IGF1R, IL2Rbeta, IL1, ILIA, IL1B, IL1F10, IL2, IL4, IL4Ra, IL5, IL5R, IL6, IL7, IL7Ra, IL8, IL9, IL9R, IL10, rhILlO, IL12, IL13, IL13Ra1, IL13Ra2, IL15, IL17, IL17Rb, IL18, IL22, IL23, IL25, IL7, IL33, IL35, ITGB4, ITK, KIR, LAG3, LAMP1, leptin, LPFS2, MHC class II, MUC-1, MUC-16, NCR3LG1, NKG2D, NKp46, NTPDase-1, OX40, OX40L, PD-1, PD-L1, PD-L2, PROM1, S152, SIRPalpha, SISP1, SLC, SPG64, ST2, STEAP1, STEAP2, Syk kinase, STEAP1, TROP2, TACI, TDO, TGFBETA, T14, TIGIT, TIM3, TLR, TLR2, TLR4, TLR5, TLR9, TMEF1, TNFa, TNFRSF7, Tp55, TREM1, TSLP, TSLPR, TWEAK, VEGF, VISTA, Vstm3, or WUCAM. For example, the antigen binding polypeptide complex may specifically bind CD28, CD3, cMet, and Trop2. For example, the antigen binding polypeptide complex may specifically bind CD28, CD3, CD19, and CD20. For example, VL2 and VH2 may specifically bind to cMet. For example, VL4 and VH4 may specifically bind to cMet. For example, VL2 and VH2 may specifically bind to Trop2. For example, VL4 and VH4 may specifically bind to Trop2. For example, VL2 and VH2 may specifically bind to CD19. For example, VL4 and VH4 may specifically bind to CD19. For example, VL2 and VH2 may specifically bind to CD20. For example, VL4 and VH4 may specifically bind to CD20.

[0183] In some aspects, the invention is directed to an antigen binding polypeptide complex comprising a first polypeptide and a second polypeptide; wherein the first polypeptide has a structure represented by VL1-L1-VL2-L2-VH2-L3-VH1-L4-Fc; or VH1-L5-VH2-L6-VL2-L7-VL1-L8-Fc; wherein the second polypeptide has a structure represented by VL3-L9-VL4-L10-VH4-L11-VH3-L12-Fc; or VH3-L13-VH4-L14-VL4-L15-VL3-L16-Fc; wherein VL1 is a first immunoglobulin light chain variable region that specifically binds to A2AR, APRIL, ATPDase, BAFF, BAFFR, BCMA, BlyS, BTK, BTLA, B7DC, B7H1, B7H2, B7H3, B7H4, B7H5, B7H6, B7H7, B7RP1, B7-4, C3, C5, CCL2, CCL3, CCL4, CCL5, CCL7, CCL8, CCL11, CCL15, CCL17, CCL19, CCL20, CCL21, CCL25, CCR3, CCR4, CD16A, CD19, CD20, CD24, CD27, CD28, CD30, CD38, CD39, CD40, CD40L, CD47, CD52, CD70, CD80, CD86, CD123, CD133, CD137, CD137L, CD160, CD272, CEACAM5, CLEC9, CLEC91, CRTH2, CSF-1, CSF-2, CSF-3, CXCL1, CXCL2, CXCL4, CXCL12, CXCL13, CXCR3, cMet, CTLA4, DLL3, DLL4, DNGR-1, E-cadherin, EGFR, ENTPD1, EpCAM, FCER1, FCER1A, FCER2, FGFR, FLAP, FOLH1, Gi24, GITR, GITRL, GPR5, GP100, GPRC5D, HER2, HER3, ICOSL, ICOS, HHLA2, HMGB1, HVEM, IDO, IFNa, IgE, IGF1R, IL2Rbeta, IL1, ILIA, IL1B, IL1F10, IL2, IL4, IL4Ra, IL5, IL5R, IL6, IL7, IL7Ra, IL8, IL9, IL9R, IL10, rhILlO, IL12, IL13, IL13Ra1, IL13Ra2, IL15, IL17, IL17Rb, IL18, IL22, IL23, IL25, IL7, IL33, IL35, ITGB4, ITK, KIR, LAG3, LAMP1, leptin, LPFS2, MHC class II, MUC-1, MUC-16, NCR3LG1, NKG2D, NKp46, NTPDase-1, OX40, OX40L, PD-1, PD-L1, PD-L2, PROM1, S152, SIRPalpha, SISP1, SLC, SPG64, ST2, STEAP1, STEAP2, Syk kinase, STEAP1, TROP2, TACI, TDO, TGFBETA, T14, TIGIT, TIM3, TLR, TLR2, TLR4, TLR5, TLR9, TMEF1, TNFa, TNFRSF7, Tp55, TREM1, TSLP, TSLPR, TWEAK, VEGF, VISTA, Vstm3, or WUCAM; VL2 is a second immunoglobulin light chain variable region that specifically binds to CD28; VL3 is a third immunoglobulin light chain variable region that specifically binds to CD3; VL4 is a fourth immunoglobulin light chain variable region that specifically binds to A2AR, APRIL, ATPDase, BAFF, BAFFR, BCMA, BlyS, BTK, BTLA, B7DC, B7H1, B7H2, B7H3, B7H4, B7H5, B7H6, B7H7, B7RP1, B7-4, C3, C5, CCL2, CCL3, CCL4, CCL5, CCL7, CCL8, CCL11, CCL15, CCL17, CCL19, CCL20, CCL21, CCL25, CCR3, CCR4, CD16A, CD19, CD20, CD24, CD27, CD28, CD30, CD38, CD39, CD40, CD40L, CD47, CD52, CD70, CD80, CD86, CD123, CD133, CD137, CD137L, CD160, CD272, CEACAM5, CLEC9, CLEC91, CRTH2, CSF-1, CSF-2, CSF-3, CXCL1, CXCL2, CXCL4, CXCL12, CXCL13, CXCR3, cMet, CTLA4, DLL3, DLL4, DNGR-1, E-cadherin, EGFR, ENTPD1, EpCAM, FCER1, FCER1A, FCER2, FGFR, FLAP, FOLH1, Gi24, GITR, GITRL, GPR5, GP100, GPRC5D, HER2, HER3, ICOSL, ICOS, HHLA2, HMGB1, HVEM, IDO, IFNa, IgE, IGF1R, IL2Rbeta, IL1, ILIA, IL1B, IL1F10, IL2, IL4, IL4Ra, IL5, IL5R, IL6, IL7, IL7Ra, IL8, IL9, IL9R, IL10, rhILlO, IL12, IL13, IL13Ra1, IL13Ra2, IL15, IL17, IL17Rb, IL18, IL22, IL23, IL25, IL7, IL33, IL35, ITGB4, ITK, KIR, LAG3, LAMP1, leptin, LPFS2, MHC class II, MUC-1, MUC-16, NCR3LG1, NKG2D, NKp46, NTPDase-1, OX40, OX40L, PD-1, PD-L1, PD-L2, PROM1, S152, SIRPalpha, SISP1, SLC, SPG64, ST2, STEAP1, STEAP2, Syk kinase, STEAP1, TROP2, TACI, TDO, TGFBETA, T14, TIGIT, TIM3, TLR, TLR2, TLR4, TLR5, TLR9, TMEF1, TNFa, TNFRSF7, Tp55, TREM1, TSLP, TSLPR, TWEAK, VEGF, VISTA, Vstm3, or WUCAM; VH1 is a first immunoglobulin heavy chain variable region that specifically binds to A2AR, APRIL, ATPDase, BAFF, BAFFR, BCMA, BlyS, BTK, BTLA, B7DC, B7H1, B7H2, B7H3, B7H4, B7H5, B7H6, B7H7, B7RP1, B7-4, C3, C5, CCL2, CCL3, CCL4, CCL5, CCL7, CCL8, CCL11, CCL15, CCL17, CCL19, CCL20, CCL21, CCL25, CCR3, CCR4, CD16A, CD19, CD20, CD24, CD27, CD28, CD30, CD38, CD39, CD40, CD40L, CD47, CD52, CD70, CD80, CD86, CD123, CD133, CD137, CD137L, CD160, CD272, CEACAM5, CLEC9, CLEC91, CRTH2, CSF-1, CSF-2, CSF-3, CXCL1, CXCL2, CXCL4, CXCL12, CXCL13, CXCR3, cMet, CTLA4, DLL3, DLL4, DNGR-1, E-cadherin, EGFR, ENTPD1, EpCAM, FCER1, FCER1A, FCER2, FGFR, FLAP, FOLH1, Gi24, GITR, GITRL, GPR5, GP100, GPRC5D, HER2, HER3, ICOSL, ICOS, HHLA2, HMGB1, HVEM, IDO, IFNa, IgE, IGF1R, IL2Rbeta, IL1, ILIA, IL1B, IL1F10, IL2, IL4, IL4Ra, IL5, IL5R, IL6, IL7, IL7Ra, IL8, IL9, IL9R, IL10, rhILlO, IL12, IL13, IL13Ra1, IL13Ra2, IL15, IL17, IL17Rb, IL18, IL22, IL23, IL25, IL7, IL33, IL35, ITGB4, ITK, KIR, LAG3, LAMP1, leptin, LPFS2, MHC class II, MUC-1, MUC-16, NCR3LG1, NKG2D, NKp46, NTPDase-1, OX40, OX40L, PD-1, PD-L1, PD-L2, PROM1, S152, SIRPalpha, SISP1, SLC, SPG64, ST2, STEAP1, STEAP2, Syk kinase, STEAP1, TROP2, TACI, TDO, TGFBETA, T14, TIGIT, TIM3, TLR, TLR2, TLR4, TLR5, TLR9, TMEF1, TNFa, TNFRSF7, Tp55, TREM1, TSLP, TSLPR, TWEAK, VEGF, VISTA, Vstm3, or WUCAM; VH2 is a second immunoglobulin heavy chain variable region that specifically binds to CD28; VH3 is a third immunoglobulin heavy chain variable region that specifically binds to CD3; VH4 is a fourth immunoglobulin heavy chain variable region that specifically binds to A2AR, APRIL, ATPDase, BAFF, BAFFR, BCMA, BlyS, BTK, BTLA, B7DC, B7H1, B7H2, B7H3, B7H4, B7H5, B7H6, B7H7, B7RP1, B7-4, C3, C5, CCL2, CCL3, CCL4, CCL5, CCL7, CCL8, CCL11, CCL15, CCL17, CCL19, CCL20, CCL21, CCL25, CCR3, CCR4, CD16A, CD19, CD20, CD24, CD27, CD28, CD30, CD38, CD39, CD40, CD40L, CD47, CD52, CD70, CD80, CD86, CD123, CD133, CD137, CD137L, CD160, CD272, CEACAM5, CLEC9, CLEC91, CRTH2, CSF-1, CSF-2, CSF-3, CXCL1, CXCL2, CXCL4, CXCL12, CXCL13, CXCR3, cMet, CTLA4, DLL3, DLL4, DNGR-1, E-cadherin, EGFR, ENTPD1, EpCAM, FCER1, FCER1A, FCER2, FGFR, FLAP, FOLH1, Gi24, GITR, GITRL, GPR5, GP100, GPRC5D, HER2, HER3, ICOSL, ICOS, HHLA2, HMGB1, HVEM, IDO, IFNa, IgE, IGF1R, IL2Rbeta, IL1, ILIA, IL1B, IL1F10, IL2, IL4, IL4Ra, IL5, IL5R, IL6, IL7, IL7Ra, IL8, IL9, IL9R, IL10, rhILlO, IL12, IL13, IL13Ra1, IL13Ra2, IL15, IL17, IL17Rb, IL18, IL22, IL23, IL25, IL7, IL33, IL35, ITGB4, ITK, KIR, LAG3, LAMP1, leptin, LPFS2, MHC class II, MUC-1, MUC-16, NCR3LG1, NKG2D, NKp46, NTPDase-1, OX40, OX40L, PD-1, PD-L1, PD-L2, PROM1, S152, SIRPalpha, SISP1, SLC, SPG64, ST2, STEAP1, STEAP2, Syk kinase, STEAP1, TROP2, TACI, TDO, TGFBETA, T14, TIGIT, TIM3, TLR, TLR2, TLR4, TLR5, TLR9, TMEF1, TNFa, TNFRSF7, Tp55, TREM1, TSLP, TSLPR, TWEAK, VEGF, VISTA, Vstm3, or WUCAM; Fc is a region comprising an immunoglobulin heavy chain constant region 2 (CH2), an immunoglobulin heavy chain constant region 3 (CH3), and optionally, an immunoglobulin hinge; and L1-L16 are amino acid linkers. In some aspects, the first polypeptide has a structure represented by VL1-L1-VL2-L2-VH2-L3-VH1-L4-Fc and the second polypeptide has a structure represented by VL3-L9-VL4-L10-VH4-L11-VH3-L12-Fc. In some aspects, the first polypeptide has a structure represented by VL1-L1-VL2-L2-VH2-L3-VH1-L4-Fc and the second polypeptide has a structure represented by VH3-L13-VH4-L14-VL4-L15-VL3-L16-Fc. In some aspects, the first polypeptide has a structure represented by VH1-L5-VH2-L6-VL2-L7-VL1-L8-Fc and the second polypeptide has a structure represented by VL3-L9-VL4-L10-VH4-L11-VH3-L12-Fc. In some aspects, the first polypeptide has a structure represented by VH1-L5-VH2-L6-VL2-L7-VL1-L8-Fc and the second polypeptide has a structure represented by VH3-L13-VH4-L14-VL4-L15-VL3-L16-Fc. In some aspects, VL1 and VH1 may specifically bind to A2AR, APRIL, ATPDase, BAFF, BAFFR, BCMA, BlyS, BTK, BTLA, B7DC, B7H1, B7H2, B7H3, B7H4, B7H5, B7H6, B7H7, B7RP1, B7-4, C3, C5, CCL2, CCL3, CCL4, CCL5, CCL7, CCL8, CCL11, CCL15, CCL17, CCL19, CCL20, CCL21, CCL25, CCR3, CCR4, CD16A, CD19, CD20, CD24, CD27, CD28, CD30, CD38, CD39, CD40, CD40L, CD47, CD52, CD70, CD80, CD86, CD123, CD133, CD137, CD137L, CD160, CD272, CEACAM5, CLEC9, CLEC91, CRTH2, CSF-1, CSF-2, CSF-3, CXCL1, CXCL2, CXCL4, CXCL12, CXCL13, CXCR3, cMet, CTLA4, DLL3, DLL4, DNGR-1, E-cadherin, EGFR, ENTPD1, EpCAM, FCER1, FCER1A, FCER2, FGFR, FLAP, FOLH1, Gi24, GITR, GITRL, GPR5, GP100, GPRC5D, HER2, HER3, ICOSL, ICOS, HHLA2, HMGB1, HVEM, IDO, IFNa, IgE, IGF1R, IL2Rbeta, IL1, ILIA, IL1B, IL1F10, IL2, IL4, IL4Ra, IL5, IL5R, IL6, IL7, IL7Ra, IL8, IL9, IL9R, IL10, rhILlO, IL12, IL13, IL13Ra1, IL13Ra2, IL15, IL17, IL17Rb, IL18, IL22, IL23, IL25, IL7, IL33, IL35, ITGB4, ITK, KIR, LAG3, LAMP1, leptin, LPFS2, MHC class II, MUC-1, MUC-16, NCR3LG1, NKG2D, NKp46, NTPDase-1, OX40, OX40L, PD-1, PD-L1, PD-L2, PROM1, S152, SIRPalpha, SISP1, SLC, SPG64, ST2, STEAP1, STEAP2, Syk kinase, STEAP1, TROP2, TACI, TDO, TGFBETA, T14, TIGIT, TIM3, TLR, TLR2, TLR4, TLR5, TLR9, TMEF1, TNFa, TNFRSF7, Tp55, TREM1, TSLP, TSLPR, TWEAK, VEGF, VISTA, Vstm3, or WUCAM. In some aspects, VL4 and VH4 may specifically bind to A2AR, APRIL, ATPDase, BAFF, BAFFR, BCMA, BlyS, BTK, BTLA, B7DC, B7H1, B7H2, B7H3, B7H4, B7H5, B7H6, B7H7, B7RP1, B7-4, C3, C5, CCL2, CCL3, CCL4, CCL5, CCL7, CCL8, CCL11, CCL15, CCL17, CCL19, CCL20, CCL21, CCL25, CCR3, CCR4, CD16A, CD19, CD20, CD24, CD27, CD28, CD30, CD38, CD39, CD40, CD40L, CD47, CD52, CD70, CD80, CD86, CD123, CD133, CD137, CD137L, CD160, CD272, CEACAM5, CLEC9, CLEC91, CRTH2, CSF-1, CSF-2, CSF-3, CXCL1, CXCL2, CXCL4, CXCL12, CXCL13, CXCR3, cMet, CTLA4, DLL3, DLL4, DNGR-1, E-cadherin, EGFR, ENTPD1, EpCAM, FCER1, FCER1A, FCER2, FGFR, FLAP, FOLH1, Gi24, GITR, GITRL, GPR5, GP100, GPRC5D, HER2, HER3, ICOSL, ICOS, HHLA2, HMGB1, HVEM, IDO, IFNa, IgE, IGF1R, IL2Rbeta, IL1, ILIA, IL1B, IL1F10, IL2, IL4, IL4Ra, IL5, IL5R, IL6, IL7, IL7Ra, IL8, IL9, IL9R, IL10, rhILlO, IL12, IL13, IL13Ra1, IL13Ra2, IL15, IL17, IL17Rb, IL18, IL22, IL23, IL25, IL7, IL33, IL35, ITGB4, ITK, KIR, LAG3, LAMP1, leptin, LPFS2, MHC class II, MUC-1, MUC-16, NCR3LG1, NKG2D, NKp46, NTPDase-1, OX40, OX40L, PD-1, PD-L1, PD-L2, PROM1, S152, SIRPalpha, SISP1, SLC, SPG64, ST2, STEAP1, STEAP2, Syk kinase, STEAP1, TROP2, TACI, TDO, TGFBETA, T14, TIGIT, TIM3, TLR, TLR2, TLR4, TLR5, TLR9, TMEF1, TNFa, TNFRSF7, Tp55, TREM1, TSLP, TSLPR, TWEAK, VEGF, VISTA, Vstm3, or WUCAM. For example, the antigen binding polypeptide complex may specifically bind CD28, CD3, cMet, and Trop2. For example, the antigen binding polypeptide complex may specifically bind CD28, CD3, CD19, and CD20. For example, VL1 and VH1 may specifically bind to cMet. For example, VL4 and VH4 may specifically bind to cMet. For example, VL1 and VH1 may specifically bind to Trop2. For example, VL4 and VH4 may specifically bind to Trop2. For example, VL1 and VH1 may specifically bind to CD19. For example, VL4 and VH4 may specifically bind to CD19. For example, VL1 and VH1 may specifically bind to CD20. For example, VL4 and VH4 may specifically bind to CD20.

[0184] In some aspects, the invention is directed to an antigen binding polypeptide complex comprising a first polypeptide and a second polypeptide; wherein the first polypeptide has a structure represented by VL1-L1-VL2-L2-VH2-L3-VH1-L4-Fc; or VH1-L5-VH2-L6-VL2-L7-VL1-L8-Fc; wherein the second polypeptide has a structure represented by VL3-L9-VL4-L10-VH4-L11-VH3-L12-Fc; or VH3-L13-VH4-L14-VL4-L15-VL3-L16-Fc; wherein VL1 is a first immunoglobulin light chain variable region that specifically binds to A2AR, APRIL, ATPDase, BAFF, BAFFR, BCMA, BlyS, BTK, BTLA, B7DC, B7H1, B7H2, B7H3, B7H4, B7H5, B7H6, B7H7, B7RP1, B7-4, C3, C5, CCL2, CCL3, CCL4, CCL5, CCL7, CCL8, CCL11, CCL15, CCL17, CCL19, CCL20, CCL21, CCL25, CCR3, CCR4, CD16A, CD19, CD20, CD24, CD27, CD28, CD30, CD38, CD39, CD40, CD40L, CD47, CD52, CD70, CD80, CD86, CD123, CD133, CD137, CD137L, CD160, CD272, CEACAM5, CLEC9, CLEC91, CRTH2, CSF-1, CSF-2, CSF-3, CXCL1, CXCL2, CXCL4, CXCL12, CXCL13, CXCR3, cMet, CTLA4, DLL3, DLL4, DNGR-1, E-cadherin, EGFR, ENTPD1, EpCAM, FCER1, FCER1A, FCER2, FGFR, FLAP, FOLH1, Gi24, GITR, GITRL, GPR5, GP100, GPRC5D, HER2, HER3, ICOSL, ICOS, HHLA2, HMGB1, HVEM, IDO, IFNa, IgE, IGF1R, IL2Rbeta, IL1, ILIA, IL1B, IL1F10, IL2, IL4, IL4Ra, IL5, IL5R, IL6, IL7, IL7Ra, IL8, IL9, IL9R, IL10, rhILlO, IL12, IL13, IL13Ra1, IL13Ra2, IL15, IL17, IL17Rb, IL18, IL22, IL23, IL25, IL7, IL33, IL35, ITGB4, ITK, KIR, LAG3, LAMP1, leptin, LPFS2, MHC class II, MUC-1, MUC-16, NCR3LG1, NKG2D, NKp46, NTPDase-1, OX40, OX40L, PD-1, PD-L1, PD-L2, PROM1, S152, SIRPalpha, SISP1, SLC, SPG64, ST2, STEAP1, STEAP2, Syk kinase, STEAP1, TROP2, TACI, TDO, TGFBETA, T14, TIGIT, TIM3, TLR, TLR2, TLR4, TLR5, TLR9, TMEF1, TNFa, TNFRSF7, Tp55, TREM1, TSLP, TSLPR, TWEAK, VEGF, VISTA, Vstm3, or WUCAM; VL2 is a second immunoglobulin light chain variable region that specifically binds to A2AR, APRIL, ATPDase, BAFF, BAFFR, BCMA, BlyS, BTK, BTLA, B7DC, B7H1, B7H2, B7H3, B7H4, B7H5, B7H6, B7H7, B7RP1, B7-4, C3, C5, CCL2, CCL3, CCL4, CCL5, CCL7, CCL8, CCL11, CCL15, CCL17, CCL19, CCL20, CCL21, CCL25, CCR3, CCR4, CD16A, CD19, CD20, CD24, CD27, CD28, CD30, CD38, CD39, CD40, CD40L, CD47, CD52, CD70, CD80, CD86, CD123, CD133, CD137, CD137L, CD160, CD272, CEACAM5, CLEC9, CLEC91, CRTH2, CSF-1, CSF-2, CSF-3, CXCL1, CXCL2, CXCL4, CXCL12, CXCL13, CXCR3, cMet, CTLA4, DLL3, DLL4, DNGR-1, E-cadherin, EGFR, ENTPD1, EpCAM, FCER1, FCER1A, FCER2, FGFR, FLAP, FOLH1, Gi24, GITR, GITRL, GPR5, GP100, GPRC5D, HER2, HER3, ICOSL, ICOS, HHLA2, HMGB1, HVEM, IDO, IFNa, IgE, IGF1R, IL2Rbeta, IL1, ILIA, IL1B, IL1F10, IL2, IL4, IL4Ra, IL5, IL5R, IL6, IL7, IL7Ra, IL8, IL9, IL9R, IL10, rhILlO, IL12, IL13, IL13Ra1, IL13Ra2, IL15, IL17, IL17Rb, IL18, IL22, IL23, IL25, IL7, IL33, IL35, ITGB4, ITK, KIR, LAG3, LAMP1, leptin, LPFS2, MHC class II, MUC-1, MUC-16, NCR3LG1, NKG2D, NKp46, NTPDase-1, OX40, OX40L, PD-1, PD-L1, PD-L2, PROM1, 5152, SIRPalpha, SISP1, SLC, SPG64, ST2, STEAP1, STEAP2, Syk kinase, STEAP1, TROP2, TACI, TDO, TGFBETA, T14, TIGIT, TIM3, TLR, TLR2, TLR4, TLR5, TLR9, TMEF1, TNFa, TNFRSF7, Tp55, TREM1, TSLP, TSLPR, TWEAK, VEGF, VISTA, Vstm3, or WUCAM; VL3 is a third immunoglobulin light chain variable region that specifically binds to CD3; VL4 is a fourth immunoglobulin light chain variable region that specifically binds to CD28; VH1 is a first immunoglobulin heavy chain variable region that specifically binds to A2AR, APRIL, ATPDase, BAFF, BAFFR, BCMA, BlyS, BTK, BTLA, B7DC, B7H1, B7H2, B7H3, B7H4, B7H5, B7H6, B7H7, B7RP1, B7-4, C3, C5, CCL2, CCL3, CCL4, CCL5, CCL7, CCL8, CCL11, CCL15, CCL17, CCL19, CCL20, CCL21, CCL25, CCR3, CCR4, CD16A, CD19, CD20, CD24, CD27, CD28, CD30, CD38, CD39, CD40, CD40L, CD47, CD52, CD70, CD80, CD86, CD123, CD133, CD137, CD137L, CD160, CD272, CEACAM5, CLEC9, CLEC91, CRTH2, CSF-1, CSF-2, CSF-3, CXCL1, CXCL2, CXCL4, CXCL12, CXCL13, CXCR3, cMet, CTLA4, DLL3, DLL4, DNGR-1, E-cadherin, EGFR, ENTPD1, EpCAM, FCER1, FCER1A, FCER2, FGFR, FLAP, FOLH1, Gi24, GITR, GITRL, GPR5, GP100, GPRC5D, HER2, HER3, ICOSL, ICOS, HHLA2, HMGB1, HVEM, IDO, IFNa, IgE, IGF1R, IL2Rbeta, IL1, ILIA, IL1B, IL1F10, IL2, IL4, IL4Ra, IL5, IL5R, IL6, IL7, IL7Ra, IL8, IL9, IL9R, IL10, rhILlO, IL12, IL13, IL13Ra1, IL13Ra2, IL15, IL17, IL17Rb, IL18, IL22, IL23, IL25, IL7, IL33, IL35, ITGB4, ITK, KIR, LAG3, LAMP1, leptin, LPFS2, MHC class II, MUC-1, MUC-16, NCR3LG1, NKG2D, NKp46, NTPDase-1, OX40, OX40L, PD-1, PD-L1, PD-L2, PROM1, S152, SIRPalpha, SISP1, SLC, SPG64, ST2, STEAP1, STEAP2, Syk kinase, STEAP1, TROP2, TACI, TDO, TGFBETA, T14, TIGIT, TIM3, TLR, TLR2, TLR4, TLR5, TLR9, TMEF1, TNFa, TNFRSF7, Tp55, TREM1, TSLP, TSLPR, TWEAK, VEGF, VISTA, Vstm3, or WUCAM; VH2 is a second immunoglobulin heavy chain variable region that specifically binds to A2AR, APRIL, ATPDase, BAFF, BAFFR, BCMA, BlyS, BTK, BTLA, B7DC, B7H1, B7H2, B7H3, B7H4, B7H5, B7H6, B7H7, B7RP1, B7-4, C3, C5, CCL2, CCL3, CCL4, CCL5, CCL7, CCL8, CCL11, CCL15, CCL17, CCL19, CCL20, CCL21, CCL25, CCR3, CCR4, CD16A, CD19, CD20, CD24, CD27, CD28, CD30, CD38, CD39, CD40, CD40L, CD47, CD52, CD70, CD80, CD86, CD123, CD133, CD137, CD137L, CD160, CD272, CEACAM5, CLEC9, CLEC91, CRTH2, CSF-1, CSF-2, CSF-3, CXCL1, CXCL2, CXCL4, CXCL12, CXCL13, CXCR3, cMet, CTLA4, DLL3, DLL4, DNGR-1, E-cadherin, EGFR, ENTPD1, EpCAM, FCER1, FCER1A, FCER2, FGFR, FLAP, FOLH1, Gi24, GITR, GITRL, GPR5, GP100, GPRC5D, HER2, HER3, ICOSL, ICOS, HHLA2, HMGB1, HVEM, IDO, IFNa, IgE, IGF1R, IL2Rbeta, IL1, ILIA, IL1B, IL1F10, IL2, IL4, IL4Ra, IL5, IL5R, IL6, IL7, IL7Ra, IL8, IL9, IL9R, IL10, rhILlO, IL12, IL13, IL13Ra1, IL13Ra2, IL15, IL17, IL17Rb, IL18, IL22, IL23, IL25, IL7, IL33, IL35, ITGB4, ITK, KIR, LAG3, LAMP1, leptin, LPFS2, MHC class II, MUC-1, MUC-16, NCR3LG1, NKG2D, NKp46, NTPDase-1, OX40, OX40L, PD-1, PD-L1, PD-L2, PROM1, S152, SIRPalpha, SISP1, SLC, SPG64, ST2, STEAP1, STEAP2, Syk kinase, STEAP1, TROP2, TACI, TDO, TGFBETA, T14, TIGIT, TIM3, TLR, TLR2, TLR4, TLR5, TLR9, TMEF1, TNFa, TNFRSF7, Tp55, TREM1, TSLP, TSLPR, TWEAK, VEGF, VISTA, Vstm3, or WUCAM; VH3 is a third immunoglobulin heavy chain variable region that specifically binds to CD3; VH4 is a fourth immunoglobulin heavy chain variable region that specifically binds to CD28; Fc is a region comprising an immunoglobulin heavy chain constant region 2 (CH2), an immunoglobulin heavy chain constant region 3 (CH3), and optionally, an immunoglobulin hinge; and L1-L16 are amino acid linkers. In some aspects, the first polypeptide has a structure represented by VL1-L1-VL2-L2-VH2-L3-VH1-L4-Fc and the second polypeptide has a structure represented by VL3-L9-VL4-L10-VH4-L11-VH3-L12-Fc. In some aspects, the first polypeptide has a structure represented by VL1-L1-VL2-L2-VH2-L3-VH1-L4-Fc and the second polypeptide has a structure represented by VH3-L13-VH4-L14-VL4-L15-VL3-L16-Fc. In some aspects, the first polypeptide has a structure represented by VH1-L5-VH2-L6-VL2-L7-VL1-L8-Fc and the second polypeptide has a structure represented by VL3-L9-VL4-L10-VH4-L11-VH3-L12-Fc. In some aspects, the first polypeptide has a structure represented by VH1-L5-VH2-L6-VL2-L7-VL1-L8-Fc and the second polypeptide has a structure represented by VH3-L13-VH4-L14-VL4-L15-VL3-L16-Fc. In some aspects, VL1 and VH1 may specifically bind to A2AR, APRIL, ATPDase, BAFF, BAFFR, BCMA, BlyS, BTK, BTLA, B7DC, B7H1, B7H2, B7H3, B7H4, B7H5, B7H6, B7H7, B7RP1, B7-4, C3, C5, CCL2, CCL3, CCL4, CCL5, CCL7, CCL8, CCL11, CCL15, CCL17, CCL19, CCL20, CCL21, CCL25, CCR3, CCR4, CD16A, CD19, CD20, CD24, CD27, CD28, CD30, CD38, CD39, CD40, CD40L, CD47, CD52, CD70, CD80, CD86, CD123, CD133, CD137, CD137L, CD160, CD272, CEACAM5, CLEC9, CLEC91, CRTH2, CSF-1, CSF-2, CSF-3, CXCL1, CXCL2, CXCL4, CXCL12, CXCL13, CXCR3, cMet, CTLA4, DLL3, DLL4, DNGR-1, E-cadherin, EGFR, ENTPD1, EpCAM, FCER1, FCER1A, FCER2, FGFR, FLAP, FOLH1, Gi24, GITR, GITRL, GPR5, GP100, GPRC5D, HER2, HER3, ICOSL, ICOS, HHLA2, HMGB1, HVEM, IDO, IFNa, IgE, IGF1R, IL2Rbeta, IL1, ILIA, IL1B, IL1F10, IL2, IL4, IL4Ra, IL5, IL5R, IL6, IL7, IL7Ra, IL8, IL9, IL9R, IL10, rhILlO, IL12, IL13, IL13Ra1, IL13Ra2, IL15, IL17, IL17Rb, IL18, IL22, IL23, IL25, IL7, IL33, IL35, ITGB4, ITK, KIR, LAG3, LAMP1, leptin, LPFS2, MHC class II, MUC-1, MUC-16, NCR3LG1, NKG2D, NKp46, NTPDase-1, OX40, OX40L, PD-1, PD-L1, PD-L2, PROM1, S152, SIRPalpha, SISP1, SLC, SPG64, ST2, STEAP1, STEAP2, Syk kinase, STEAP1, TROP2, TACI, TDO, TGFBETA, T14, TIGIT, TIM3, TLR, TLR2, TLR4, TLR5, TLR9, TMEF1, TNFa, TNFRSF7, Tp55, TREM1, TSLP, TSLPR, TWEAK, VEGF, VISTA, Vstm3, or WUCAM. In some aspects, VL2 and VH2 may specifically bind to A2AR, APRIL, ATPDase, BAFF, BAFFR, BCMA, BlyS, BTK, BTLA, B7DC, B7H1, B7H2, B7H3, B7H4, B7H5, B7H6, B7H7, B7RP1, B7-4, C3, C5, CCL2, CCL3, CCL4, CCL5, CCL7, CCL8, CCL11, CCL15, CCL17, CCL19, CCL20, CCL21, CCL25, CCR3, CCR4, CD16A, CD19, CD20, CD24, CD27, CD28, CD30, CD38, CD39, CD40, CD40L, CD47, CD52, CD70, CD80, CD86, CD123, CD133, CD137, CD137L, CD160, CD272, CEACAM5, CLEC9, CLEC91, CRTH2, CSF-1, CSF-2, CSF-3, CXCL1, CXCL2, CXCL4, CXCL12, CXCL13, CXCR3, cMet, CTLA4, DLL3, DLL4, DNGR-1, E-cadherin, EGFR, ENTPD1, EpCAM, FCER1, FCER1A, FCER2, FGFR, FLAP, FOLH1, Gi24, GITR, GITRL, GPR5, GP100, GPRC5D, HER2, HER3, ICOSL, ICOS, HHLA2, HMGB1, HVEM, IDO, IFNa, IgE, IGF1R, IL2Rbeta, IL1, ILIA, IL1B, IL1F10, IL2, IL4, IL4Ra, IL5, IL5R, IL6, IL7, IL7Ra, IL8, IL9, IL9R, IL10, rhILlO, IL12, IL13, IL13Ra1, IL13Ra2, IL15, IL17, IL17Rb, IL18, IL22, IL23, IL25, IL7, IL33, IL35, ITGB4, ITK, KIR, LAG3, LAMP1, leptin, LPFS2, MHC class II, MUC-1, MUC-16, NCR3LG1, NKG2D, NKp46, NTPDase-1, OX40, OX40L, PD-1, PD-L1, PD-L2, PROM1, S152, SIRPalpha, SISP1, SLC, SPG64, ST2, STEAP1, STEAP2, Syk kinase, STEAP1, TROP2, TACI, TDO, TGFBETA, T14, TIGIT, TIM3, TLR, TLR2, TLR4, TLR5, TLR9, TMEF1, TNFa, TNFRSF7, Tp55, TREM1, TSLP, TSLPR, TWEAK, VEGF, VISTA, Vstm3, or WUCAM. For example, the antigen binding polypeptide complex may specifically bind CD28, CD3, cMet, and Trop2. For example, the antigen binding polypeptide complex may specifically bind CD28, CD3, CD19, and CD20. For example, VL1 and VH1 may specifically bind to cMet. For example, VL2 and VH2 may specifically bind to cMet. For example, VL1 and VH1 may specifically bind to Trop2. For example, VL2 and VH2 may specifically bind to Trop2. For example, VL1 and VH1 may specifically bind to CD19. For example, VL2 and VH2 may specifically bind to CD19. For example, VL1 and VH1 may specifically bind to CD20. For example, VL2 and VH2 may specifically bind to CD20.

[0185] In some aspects of the antigen binding polypeptide complexes described herein, VL3 and VH3 specifically bind to CD3, VL4 and VH4 specifically bind to CD28, VL2 and VH2 specifically bind to Trop2, and VL1 and VH1 specifically bind to cMet. In some aspects, VL3 and VH3 specifically bind to CD3, VL4 and VH4 specifically bind to CD28, VL2 and VH2 specifically bind to cMet, and VL1 and VH1 specifically bind to Trop2. In some aspects, VL3 and VH3 specifically bind to CD3, VL4 and VH4 specifically bind to Trop2, VL2 and VH2 specifically bind to CD28, and VL1 and VH1 specifically bind to cMet. In some aspects, VL3 and VH3 specifically bind to CD3, VL4 and VH4 specifically bind to Trop2, VL2 and VH2 specifically bind to cMet, and VL1 and VH1 specifically bind to CD28. In some aspects, VL3 and VH3 specifically bind to CD3, VL4 and VH4 specifically bind to cMet, VL2 and VH2 specifically bind to Trop2, and VL1 and VH1 specifically bind to CD28. In some aspects, VL3 and VH3 specifically bind to CD3, VL4 and VH4 specifically bind to cMet, VL2 and VH2 specifically bind to CD28, and VL1 and VH1 specifically bind to Trop2. In some aspects, VL3 and VH3 specifically bind to CD3, VL4 and VH4 specifically bind to CD28, VL2 and VH2 specifically bind to CD20, and VL1 and VH1 specifically bind to CD19. In some aspects, VL3 and VH3 specifically bind to CD3, VL4 and VH4 specifically bind to CD28, VL2 and VH2 specifically bind to CD19, and VL1 and VH1 specifically bind to CD20. In some aspects, VL3 and VH3 specifically bind to CD3, VL4 and VH4 specifically bind to CD20, VL2 and VH2 specifically bind to CD28, and VL1 and VH1 specifically bind to CD19. In some aspects, VL3 and VH3 specifically bind to CD3, VL4 and VH4 specifically bind to CD20, VL2 and VH2 specifically bind to CD19, and VL1 and VH1 specifically bind to CD28. In some aspects, VL3 and VH3 specifically bind to CD3, VL4 and VH4 specifically bind to CD19, VL2 and VH2 specifically bind to CD20, and VL1 and VH1 specifically bind to CD28. In some aspects, VL3 and VH3 specifically bind to CD3, VL4 and VH4 specifically bind to CD19, VL2 and VH2 specifically bind to CD28, and VL1 and VH1 specifically bind to CD20.

[0186] In some aspects, the invention is directed to an antigen binding polypeptide complex comprising a first polypeptide and a second polypeptide; wherein the first polypeptide has a structure represented by VL1-L1-VL2-L2-VH2-L3-VH1-L4-Fc; or VH1-L5-VH2-L6-VL2-L7-VL1-L8-Fc; wherein the second polypeptide has a structure represented by VL3-L9-VL4-L10-VH4-L11-VH3-L12-Fc; or VH3-L13-VH4-L14-VL4-L15-VL3-L16-Fc; wherein VL1 is a first immunoglobulin light chain variable region that specifically binds to A2AR, APRIL, ATPDase, BAFF, BAFFR, BCMA, BlyS, BTK, BTLA, B7DC, B7H1, B7H2, B7H3, B7H4, B7H5, B7H6, B7H7, B7RP1, B7-4, C3, C5, CCL2, CCL3, CCL4, CCL5, CCL7, CCL8, CCL11, CCL15, CCL17, CCL19, CCL20, CCL21, CCL25, CCR3, CCR4, CD16A, CD19, CD20, CD24, CD27, CD28, CD30, CD38, CD39, CD40, CD40L, CD47, CD52, CD70, CD80, CD86, CD123, CD133, CD137, CD137L, CD160, CD272, CEACAM5, CLEC9, CLEC91, CRTH2, CSF-1, CSF-2, CSF-3, CXCL1, CXCL2, CXCL4, CXCL12, CXCL13, CXCR3, cMet, CTLA4, DLL3, DLL4, DNGR-1, E-cadherin, EGFR, ENTPD1, EpCAM, FCER1, FCER1A, FCER2, FGFR, FLAP, FOLH1, Gi24, GITR, GITRL, GPR5, GP100, GPRC5D, HER2, HER3, ICOSL, ICOS, HHLA2, HMGB1, HVEM, IDO, IFNa, IgE, IGF1R, IL2Rbeta, IL1, ILIA, IL1B, IL1F10, IL2, IL4, IL4Ra, IL5, IL5R, IL6, IL7, IL7Ra, IL8, IL9, IL9R, IL10, rhILlO, IL12, IL13, IL13Ra1, IL13Ra2, IL15, IL17, IL17Rb, IL18, IL22, IL23, IL25, IL7, IL33, IL35, ITGB4, ITK, KIR, LAG3, LAMP1, leptin, LPFS2, MHC class II, MUC-1, MUC-16, NCR3LG1, NKG2D, NKp46, NTPDase-1, OX40, OX40L, PD-1, PD-L1, PD-L2, PROM1, S152, SIRPalpha, SISP1, SLC, SPG64, ST2, STEAP1, STEAP2, Syk kinase, STEAP1, TROP2, TACI, TDO, TGFBETA, T14, TIGIT, TIM3, TLR, TLR2, TLR4, TLR5, TLR9, TMEF1, TNFa, TNFRSF7, Tp55, TREM1, TSLP, TSLPR, TWEAK, VEGF, VISTA, Vstm3, or WUCAM; VL2 is a second immunoglobulin light chain variable region that specifically binds to A2AR, APRIL, ATPDase, BAFF, BAFFR, BCMA, BlyS, BTK, BTLA, B7DC, B7H1, B7H2, B7H3, B7H4, B7H5, B7H6, B7H7, B7RP1, B7-4, C3, C5, CCL2, CCL3, CCL4, CCL5, CCL7, CCL8, CCL11, CCL15, CCL17, CCL19, CCL20, CCL21, CCL25, CCR3, CCR4, CD16A, CD19, CD20, CD24, CD27, CD28, CD30, CD38, CD39, CD40, CD40L, CD47, CD52, CD70, CD80, CD86, CD123, CD133, CD137, CD137L, CD160, CD272, CEACAM5, CLEC9, CLEC91, CRTH2, CSF-1, CSF-2, CSF-3, CXCL1, CXCL2, CXCL4, CXCL12, CXCL13, CXCR3, cMet, CTLA4, DLL3, DLL4, DNGR-1, E-cadherin, EGFR, ENTPD1, EpCAM, FCER1, FCER1A, FCER2, FGFR, FLAP, FOLH1, Gi24, GITR, GITRL, GPR5, GP100, GPRC5D, HER2, HER3, ICOSL, ICOS, HHLA2, HMGB1, HVEM, IDO, IFNa, IgE, IGF1R, IL2Rbeta, IL1, ILIA, IL1B, IL1F10, IL2, IL4, IL4Ra, IL5, IL5R, IL6, IL7, IL7Ra, IL8, IL9, IL9R, IL10, rhILlO, IL12, IL13, IL13Ra1, IL13Ra2, IL15, IL17, IL17Rb, IL18, IL22, IL23, IL25, IL7, IL33, IL35, ITGB4, ITK, KIR, LAG3, LAMP1, leptin, LPFS2, MHC class II, MUC-1, MUC-16, NCR3LG1, NKG2D, NKp46, NTPDase-1, OX40, OX40L, PD-1, PD-L1, PD-L2, PROM1, S152, SIRPalpha, SISP1, SLC, SPG64, ST2, STEAP1, STEAP2, Syk kinase, STEAP1, TROP2, TACI, TDO, TGFBETA, T14, TIGIT, TIM3, TLR, TLR2, TLR4, TLR5, TLR9, TMEF1, TNFa, TNFRSF7, Tp55, TREM1, TSLP, TSLPR, TWEAK, VEGF, VISTA, Vstm3, or WUCAM; VL3 is a third immunoglobulin light chain variable region that specifically binds to A2AR, APRIL, ATPDase, BAFF, BAFFR, BCMA, BlyS, BTK, BTLA, B7DC, B7H1, B7H2, B7H3, B7H4, B7H5, B7H6, B7H7, B7RP1, B7-4, C3, C5, CCL2, CCL3, CCL4, CCL5, CCL7, CCL8, CCL11, CCL15, CCL17, CCL19, CCL20, CCL21, CCL25, CCR3, CCR4, CD16A, CD19, CD20, CD24, CD27, CD28, CD30, CD38, CD39, CD40, CD40L, CD47, CD52, CD70, CD80, CD86, CD123, CD133, CD137, CD137L, CD160, CD272, CEACAM5, CLEC9, CLEC91, CRTH2, CSF-1, CSF-2, CSF-3, CXCL1, CXCL2, CXCL4, CXCL12, CXCL13, CXCR3, cMet, CTLA4, DLL3, DLL4, DNGR-1, E-cadherin, EGFR, ENTPD1, EpCAM, FCER1, FCER1A, FCER2, FGFR, FLAP, FOLH1, Gi24, GITR, GITRL, GPR5, GP100, GPRC5D, HER2, HER3, ICOSL, ICOS, HHLA2, HMGB1, HVEM, IDO, IFNa, IgE, IGF1R, IL2Rbeta, IL1, ILIA, IL1B, IL1F10, IL2, IL4, IL4Ra, IL5, IL5R, IL6, IL7, IL7Ra, IL8, IL9, IL9R, IL10, rhILlO, IL12, IL13, IL13Ra1, IL13Ra2, IL15, IL17, IL17Rb, IL18, IL22, IL23, IL25, IL7, IL33, IL35, ITGB4, ITK, KIR, LAG3, LAMP1, leptin, LPFS2, MHC class II, MUC-1, MUC-16, NCR3LG1, NKG2D, NKp46, NTPDase-1, OX40, OX40L, PD-1, PD-L1, PD-L2, PROM1, S152, SIRPalpha, SISP1, SLC, SPG64, ST2, STEAP1, STEAP2, Syk kinase, STEAP1, TROP2, TACI, TDO, TGFBETA, T14, TIGIT, TIM3, TLR, TLR2, TLR4, TLR5, TLR9, TMEF1, TNFa, TNFRSF7, Tp55, TREM1, TSLP, TSLPR, TWEAK, VEGF, VISTA, Vstm3, or WUCAM; VL4 is a fourth immunoglobulin light chain variable region that specifically binds to CD3; VH1 is a first immunoglobulin heavy chain variable region that specifically binds to A2AR, APRIL, ATPDase, BAFF, BAFFR, BCMA, BlyS, BTK, BTLA, B7DC, B7H1, B7H2, B7H3, B7H4, B7H5, B7H6, B7H7, B7RP1, B7-4, C3, C5, CCL2, CCL3, CCL4, CCL5, CCL7, CCL8, CCL11, CCL15, CCL17, CCL19, CCL20, CCL21, CCL25, CCR3, CCR4, CD16A, CD19, CD20, CD24, CD27, CD28, CD30, CD38, CD39, CD40, CD40L, CD47, CD52, CD70, CD80, CD86, CD123, CD133, CD137, CD137L, CD160, CD272, CEACAM5, CLEC9, CLEC91, CRTH2, CSF-1, CSF-2, CSF-3, CXCL1, CXCL2, CXCL4, CXCL12, CXCL13, CXCR3, cMet, CTLA4, DLL3, DLL4, DNGR-1, E-cadherin, EGFR, ENTPD1, EpCAM, FCER1, FCER1A, FCER2, FGFR, FLAP, FOLH1, Gi24, GITR, GITRL, GPR5, GP100, GPRC5D, HER2, HER3, ICOSL, ICOS, HHLA2, HMGB1, HVEM, IDO, IFNa, IgE, IGF1R, IL2Rbeta, IL1, ILIA, IL1B, IL1F10, IL2, IL4, IL4Ra, IL5, IL5R, IL6, IL7, IL7Ra, IL8, IL9, IL9R, IL10, rhILlO, IL12, IL13, IL13Ra1, IL13Ra2, IL15, IL17, IL17Rb, IL18, IL22, IL23, IL25, IL7, IL33, IL35, ITGB4, ITK, KIR, LAG3, LAMP1, leptin, LPFS2, MHC class II, MUC-1, MUC-16, NCR3LG1, NKG2D, NKp46, NTPDase-1, OX40, OX40L, PD-1, PD-L1, PD-L2, PROM1, 5152, SIRPalpha, SISP1, SLC, SPG64, ST2, STEAP1, STEAP2, Syk kinase, STEAP1, TROP2, TACI, TDO, TGFBETA, T14, TIGIT, TIM3, TLR, TLR2, TLR4, TLR5, TLR9, TMEF1, TNFa, TNFRSF7, Tp55, TREM1, TSLP, TSLPR, TWEAK, VEGF, VISTA, Vstm3, or WUCAM; VH2 is a second immunoglobulin heavy chain variable region that specifically binds to A2AR, APRIL, ATPDase, BAFF, BAFFR, BCMA, BlyS, BTK, BTLA, B7DC, B7H1, B7H2, B7H3, B7H4, B7H5, B7H6, B7H7, B7RP1, B7-4, C3, C5, CCL2, CCL3, CCL4, CCL5, CCL7, CCL8, CCL11, CCL15, CCL17, CCL19, CCL20, CCL21, CCL25, CCR3, CCR4, CD16A, CD19, CD20, CD24, CD27, CD28, CD30, CD38, CD39, CD40, CD40L, CD47, CD52, CD70, CD80, CD86, CD123, CD133, CD137, CD137L, CD160, CD272, CEACAM5, CLEC9, CLEC91, CRTH2, CSF-1, CSF-2, CSF-3, CXCL1, CXCL2, CXCL4, CXCL12, CXCL13, CXCR3, cMet, CTLA4, DLL3, DLL4, DNGR-1, E-cadherin, EGFR, ENTPD1, EpCAM, FCER1, FCER1A, FCER2, FGFR, FLAP, FOLH1, Gi24, GITR, GITRL, GPR5, GP100, GPRC5D, HER2, HER3, ICOSL, ICOS, HHLA2, HMGB1, HVEM, IDO, IFNa, IgE, IGF1R, IL2Rbeta, IL1, ILIA, IL1B, IL1F10, IL2, IL4, IL4Ra, IL5, IL5R, IL6, IL7, IL7Ra, IL8, IL9, IL9R, IL10, rhILlO, IL12, IL13, IL13Ra1, IL13Ra2, IL15, IL17, IL17Rb, IL18, IL22, IL23, IL25, IL7, IL33, IL35, ITGB4, ITK, KIR, LAG3, LAMP1, leptin, LPFS2, MHC class II, MUC-1, MUC-16, NCR3LG1, NKG2D, NKp46, NTPDase-1, OX40, OX40L, PD-1, PD-L1, PD-L2, PROM1, S152, SIRPalpha, SISP1, SLC, SPG64, ST2, STEAP1, STEAP2, Syk kinase, STEAP1, TROP2, TACI, TDO, TGFBETA, T14, TIGIT, TIM3, TLR, TLR2, TLR4, TLR5, TLR9, TMEF1, TNFa, TNFRSF7, Tp55, TREM1, TSLP, TSLPR, TWEAK, VEGF, VISTA, Vstm3, or WUCAM; VH3 is a third immunoglobulin heavy chain variable region that specifically binds to A2AR, APRIL, ATPDase, BAFF, BAFFR, BCMA, BlyS, BTK, BTLA, B7DC, B7H1, B7H2, B7H3, B7H4, B7H5, B7H6, B7H7, B7RP1, B7-4, C3, C5, CCL2, CCL3, CCL4, CCL5, CCL7, CCL8, CCL11, CCL15, CCL17, CCL19, CCL20, CCL21, CCL25, CCR3, CCR4, CD16A, CD19, CD20, CD24, CD27, CD28, CD30, CD38, CD39, CD40, CD40L, CD47, CD52, CD70, CD80, CD86, CD123, CD133, CD137, CD137L, CD160, CD272, CEACAM5, CLEC9, CLEC91, CRTH2, CSF-1, CSF-2, CSF-3, CXCL1, CXCL2, CXCL4, CXCL12, CXCL13, CXCR3, cMet, CTLA4, DLL3, DLL4, DNGR-1, E-cadherin, EGFR, ENTPD1, EpCAM, FCER1, FCER1A, FCER2, FGFR, FLAP, FOLH1, Gi24, GITR, GITRL, GPR5, GP100, GPRC5D, HER2, HER3, ICOSL, ICOS, HHLA2, HMGB1, HVEM, IDO, IFNa, IgE, IGF1R, IL2Rbeta, IL1, ILIA, IL1B, IL1F10, IL2, IL4, IL4Ra, IL5, IL5R, IL6, IL7, IL7Ra, IL8, IL9, IL9R, IL10, rhILlO, IL12, IL13, IL13Ra1, IL13Ra2, IL15, IL17, IL17Rb, IL18, IL22, IL23, IL25, IL7, IL33, IL35, ITGB4, ITK, KIR, LAG3, LAMP1, leptin, LPFS2, MHC class II, MUC-1, MUC-16, NCR3LG1, NKG2D, NKp46, NTPDase-1, OX40, OX40L, PD-1, PD-L1, PD-L2, PROM1, S152, SIRPalpha, SISP1, SLC, SPG64, ST2, STEAP1, STEAP2, Syk kinase, STEAP1, TROP2, TACI, TDO, TGFBETA, T14, TIGIT, TIM3, TLR, TLR2, TLR4, TLR5, TLR9, TMEF1, TNFa, TNFRSF7, Tp55, TREM1, TSLP, TSLPR, TWEAK, VEGF, VISTA, Vstm3, or WUCAM; VH4 is a fourth immunoglobulin heavy chain variable region that specifically binds to CD3; Fe is a region comprising an immunoglobulin heavy chain constant region 2 (CH2), an immunoglobulin heavy chain constant region 3 (CH3), and optionally, an immunoglobulin hinge; and L1-L16 are amino acid linkers. In some aspects, the first polypeptide has a structure represented by VL1-L1-VL2-L2-VH2-L3-VH1-L4-Fc and the second polypeptide has a structure represented by VL3-L9-VL4-L10-VH4-L11-VH3-L12-Fc. In some aspects, the first polypeptide has a structure represented by VL1-L1-VL2-L2-VH2-L3-VH1-L4-Fc and the second polypeptide has a structure represented by VH3-L13-VH4-L14-VL4-L15-VL3-L16-Fc. In some aspects, the first polypeptide has a structure represented by VH1-L5-VH2-L6-VL2-L7-VL1-L8-Fc and the second polypeptide has a structure represented by VL3-L9-VL4-L10-VH4-L11-VH3-L12-Fc. In some aspects, the first polypeptide has a structure represented by VH1-L5-VH2-L6-VL2-L7-VL1-L8-Fc and the second polypeptide has a structure represented by VH3-L13-VH4-L14-VL4-L15-VL3-L16-Fc. In some aspects, VL1 and VH1 may specifically bind to A2AR, APRIL, ATPDase, BAFF, BAFFR, BCMA, BlyS, BTK, BTLA, B7DC, B7H1, B7H2, B7H3, B7H4, B7H5, B7H6, B7H7, B7RP1, B7-4, C3, C5, CCL2, CCL3, CCL4, CCL5, CCL7, CCL8, CCL11, CCL15, CCL17, CCL19, CCL20, CCL21, CCL25, CCR3, CCR4, CD16A, CD19, CD20, CD24, CD27, CD28, CD30, CD38, CD39, CD40, CD40L, CD47, CD52, CD70, CD80, CD86, CD123, CD133, CD137, CD137L, CD160, CD272, CEACAM5, CLEC9, CLEC91, CRTH2, CSF-1, CSF-2, CSF-3, CXCL1, CXCL2, CXCL4, CXCL12, CXCL13, CXCR3, cMet, CTLA4, DLL3, DLL4, DNGR-1, E-cadherin, EGFR, ENTPD1, EpCAM, FCER1, FCER1A, FCER2, FGFR, FLAP, FOLH1, Gi24, GITR, GITRL, GPR5, GP100, GPRC5D, HER2, HER3, ICOSL, ICOS, HHLA2, HMGB1, HVEM, IDO, IFNa, IgE, IGF1R, IL2Rbeta, IL1, ILIA, IL1B, IL1F10, IL2, IL4, IL4Ra, IL5, IL5R, IL6, IL7, IL7Ra, IL8, IL9, IL9R, IL10, rhILlO, IL12, IL13, IL13Ra1, IL13Ra2, IL15, IL17, IL17Rb, IL18, IL22, IL23, IL25, IL7, IL33, IL35, ITGB4, ITK, KIR, LAG3, LAMP1, leptin, LPFS2, MHC class II, MUC-1, MUC-16, NCR3LG1, NKG2D, NKp46, NTPDase-1, OX40, OX40L, PD-1, PD-L1, PD-L2, PROM1, S152, SIRPalpha, SISP1, SLC, SPG64, ST2, STEAP1, STEAP2, Syk kinase, STEAP1, TROP2, TACI, TDO, TGFBETA, T14, TIGIT, TIM3, TLR, TLR2, TLR4, TLR5, TLR9, TMEF1, TNFa, TNFRSF7, Tp55, TREM1, TSLP, TSLPR, TWEAK, VEGF, VISTA, Vstm3, or WUCAM. In some aspects, VL2 and VH2 may specifically bind to A2AR, APRIL, ATPDase, BAFF, BAFFR, BCMA, BlyS, BTK, BTLA, B7DC, B7H1, B7H2, B7H3, B7H4, B7H5, B7H6, B7H7, B7RP1, B7-4, C3, C5, CCL2, CCL3, CCL4, CCL5, CCL7, CCL8, CCL11, CCL15, CCL17, CCL19, CCL20, CCL21, CCL25, CCR3, CCR4, CD16A, CD19, CD20, CD24, CD27, CD28, CD30, CD38, CD39, CD40, CD40L, CD47, CD52, CD70, CD80, CD86, CD123, CD133, CD137, CD137L, CD160, CD272, CEACAM5, CLEC9, CLEC91, CRTH2, CSF-1, CSF-2, CSF-3, CXCL1, CXCL2, CXCL4, CXCL12, CXCL13, CXCR3, cMet, CTLA4, DLL3, DLL4, DNGR-1, E-cadherin, EGFR, ENTPD1, EpCAM, FCER1, FCER1A, FCER2, FGFR, FLAP, FOLH1, Gi24, GITR, GITRL, GPR5, GP100, GPRC5D, HER2, HER3, ICOSL, ICOS, HHLA2, HMGB1, HVEM, IDO, IFNa, IgE, IGF1R, IL2Rbeta, IL1, ILIA, IL1B, IL1F10, IL2, IL4, IL4Ra, IL5, IL5R, IL6, IL7, IL7Ra, IL8, IL9, IL9R, IL10, rhILlO, IL12, IL13, IL13Ra1, IL13Ra2, IL15, IL17, IL17Rb, IL18, IL22, IL23, IL25, IL7, IL33, IL35, ITGB4, ITK, KIR, LAG3, LAMP1, leptin, LPFS2, MHC class II, MUC-1, MUC-16, NCR3LG1, NKG2D, NKp46, NTPDase-1, OX40, OX40L, PD-1, PD-L1, PD-L2, PROM1, S152, SIRPalpha, SISP1, SLC, SPG64, ST2, STEAP1, STEAP2, Syk kinase, STEAP1, TROP2, TACI, TDO, TGFBETA, T14, TIGIT, TIM3, TLR, TLR2, TLR4, TLR5, TLR9, TMEF1, TNFa, TNFRSF7, Tp55, TREM1, TSLP, TSLPR, TWEAK, VEGF, VISTA, Vstm3, or WUCAM. In some aspects, VL3 and VH3 may specifically bind to A2AR, APRIL, ATPDase, BAFF, BAFFR, BCMA, BlyS, BTK, BTLA, B7DC, B7H1, B7H2, B7H3, B7H4, B7H5, B7H6, B7H7, B7RP1, B7-4, C3, C5, CCL2, CCL3, CCL4, CCL5, CCL7, CCL8, CCL11, CCL15, CCL17, CCL19, CCL20, CCL21, CCL25, CCR3, CCR4, CD16A, CD19, CD20, CD24, CD27, CD28, CD30, CD38, CD39, CD40, CD40L, CD47, CD52, CD70, CD80, CD86, CD123, CD133, CD137, CD137L, CD160, CD272, CEACAM5, CLEC9, CLEC91, CRTH2, CSF-1, CSF-2, CSF-3, CXCL1, CXCL2, CXCL4, CXCL12, CXCL13, CXCR3, cMet, CTLA4, DLL3, DLL4, DNGR-1, E-cadherin, EGFR, ENTPD1, EpCAM, FCER1, FCER1A, FCER2, FGFR, FLAP, FOLH1, Gi24, GITR, GITRL, GPR5, GP100, GPRC5D, HER2, HER3, ICOSL, ICOS, HHLA2, HMGB1, HVEM, IDO, IFNa, IgE, IGF1R, IL2Rbeta, IL1, ILIA, IL1B, IL1F10, IL2, IL4, IL4Ra, IL5, IL5R, IL6, IL7, IL7Ra, IL8, IL9, IL9R, IL10, rhILlO, IL12, IL13, IL13Ra1, IL13Ra2, IL15, IL17, IL17Rb, IL18, IL22, IL23, IL25, IL7, IL33, IL35, ITGB4, ITK, KIR, LAG3, LAMP1, leptin, LPFS2, MHC class II, MUC-1, MUC-16, NCR3LG1, NKG2D, NKp46, NTPDase-1, OX40, OX40L, PD-1, PD-L1, PD-L2, PROM1, S152, SIRPalpha, SISP1, SLC, SPG64, ST2, STEAP1, STEAP2, Syk kinase, STEAP1, TROP2, TACI, TDO, TGFBETA, T14, TIGIT, TIM3, TLR, TLR2, TLR4, TLR5, TLR9, TMEF1, TNFa, TNFRSF7, Tp55, TREM1, TSLP, TSLPR, TWEAK, VEGF, VISTA, Vstm3, or WUCAM. For example, the antigen binding polypeptide complex may specifically bind CD28, CD3, cMet, and Trop2. For example, the antigen binding polypeptide complex may specifically bind CD28, CD3, CD19, and CD20. For example, VL1 and VH1 may specifically bind to CD28. For example, VL2 and VH2 may specifically bind to CD28. For example, VL3 and VH3 may specifically bind to CD28. For example, VL1 and VH1 may specifically bind to cMet. For example, VL2 and VH2 may specifically bind to cMet. For example, VL3 and VH3 may specifically bind to cMet. For example, VL1 and VH1 may specifically bind to Trop2. For example, VL2 and VH2 may specifically bind to Trop2. For example, VL3 and VH3 may specifically bind to Trop2. For example, VL1 and VH1 may specifically bind to CD19. For example, VL2 and VH2 may specifically bind to CD19. For example, VL3 and VH3 may specifically bind to CD19. For example, VL1 and VH1 may specifically bind to CD20. For example, VL2 and VH2 may specifically bind to CD20. For example, VL3 and VH3 may specifically bind to CD20.

[0187] In some aspects, the invention is directed to an antigen binding polypeptide complex comprising a first polypeptide and a second polypeptide; wherein the first polypeptide has a structure represented by VL1-L1-VL2-L2-VH2-L3-VH1-L4-Fc; or VH1-L5-VH2-L6-VL2-L7-VL1-L8-Fc; wherein the second polypeptide has a structure represented by VL3-L9-VL4-L10-VH4-L11-VH3-L12-Fc; or VH3-L13-VH4-L14-VL4-L15-VL3-L16-Fc; wherein VL1 is a first immunoglobulin light chain variable region that specifically binds to CD28; VL2 is a second immunoglobulin light chain variable region that specifically binds to A2AR, APRIL, ATPDase, BAFF, BAFFR, BCMA, BlyS, BTK, BTLA, B7DC, B7H1, B7H2, B7H3, B7H4, B7H5, B7H6, B7H7, B7RP1, B7-4, C3, C5, CCL2, CCL3, CCL4, CCL5, CCL7, CCL8, CCL11, CCL15, CCL17, CCL19, CCL20, CCL21, CCL25, CCR3, CCR4, CD16A, CD19, CD20, CD24, CD27, CD28, CD30, CD38, CD39, CD40, CD40L, CD47, CD52, CD70, CD80, CD86, CD123, CD133, CD137, CD137L, CD160, CD272, CEACAM5, CLEC9, CLEC91, CRTH2, CSF-1, CSF-2, CSF-3, CXCL1, CXCL2, CXCL4, CXCL12, CXCL13, CXCR3, cMet, CTLA4, DLL3, DLL4, DNGR-1, E-cadherin, EGFR, ENTPD1, EpCAM, FCER1, FCER1A, FCER2, FGFR, FLAP, FOLH1, Gi24, GITR, GITRL, GPR5, GP100, GPRC5D, HER2, HER3, ICOSL, ICOS, HHLA2, HMGB1, HVEM, IDO, IFNa, IgE, IGF1R, IL2Rbeta, IL1, ILIA, IL1B, IL1F10, IL2, IL4, IL4Ra, IL5, IL5R, IL6, IL7, IL7Ra, IL8, IL9, IL9R, IL10, rhILlO, IL12, IL13, IL13Ra1, IL13Ra2, IL15, IL17, IL17Rb, IL18, IL22, IL23, IL25, IL7, IL33, IL35, ITGB4, ITK, KIR, LAG3, LAMP1, leptin, LPFS2, MHC class II, MUC-1, MUC-16, NCR3LG1, NKG2D, NKp46, NTPDase-1, OX40, OX40L, PD-1, PD-L1, PD-L2, PROM1, 5152, SIRPalpha, SISP1, SLC, SPG64, ST2, STEAP1, STEAP2, Syk kinase, STEAP1, TROP2, TACI, TDO, TGFBETA, T14, TIGIT, TIM3, TLR, TLR2, TLR4, TLR5, TLR9, TMEF1, TNFa, TNFRSF7, Tp55, TREM1, TSLP, TSLPR, TWEAK, VEGF, VISTA, Vstm3, or WUCAM; VL3 is a third immunoglobulin light chain variable region that specifically binds to A2AR, APRIL, ATPDase, BAFF, BAFFR, BCMA, BlyS, BTK, BTLA, B7DC, B7H1, B7H2, B7H3, B7H4, B7H5, B7H6, B7H7, B7RP1, B7-4, C3, C5, CCL2, CCL3, CCL4, CCL5, CCL7, CCL8, CCL11, CCL15, CCL17, CCL19, CCL20, CCL21, CCL25, CCR3, CCR4, CD16A, CD19, CD20, CD24, CD27, CD28, CD30, CD38, CD39, CD40, CD40L, CD47, CD52, CD70, CD80, CD86, CD123, CD133, CD137, CD137L, CD160, CD272, CEACAM5, CLEC9, CLEC91, CRTH2, CSF-1, CSF-2, CSF-3, CXCL1, CXCL2, CXCL4, CXCL12, CXCL13, CXCR3, cMet, CTLA4, DLL3, DLL4, DNGR-1, E-cadherin, EGFR, ENTPD1, EpCAM, FCER1, FCER1A, FCER2, FGFR, FLAP, FOLH1, Gi24, GITR, GITRL, GPR5, GP100, GPRC5D, HER2, HER3, ICOSL, ICOS, HHLA2, HMGB1, HVEM, IDO, IFNa, IgE, IGF1R, IL2Rbeta, IL1, ILIA, IL1B, IL1F10, IL2, IL4, IL4Ra, IL5, IL5R, IL6, IL7, IL7Ra, IL8, IL9, IL9R, IL10, rhILlO, IL12, IL13, IL13Ra1, IL13Ra2, IL15, IL17, IL17Rb, IL18, IL22, IL23, IL25, IL7, IL33, IL35, ITGB4, ITK, KIR, LAG3, LAMP1, leptin, LPFS2, MHC class II, MUC-1, MUC-16, NCR3LG1, NKG2D, NKp46, NTPDase-1, OX40, OX40L, PD-1, PD-L1, PD-L2, PROM1, S152, SIRPalpha, SISP1, SLC, SPG64, ST2, STEAP1, STEAP2, Syk kinase, STEAP1, TROP2, TACI, TDO, TGFBETA, T14, TIGIT, TIM3, TLR, TLR2, TLR4, TLR5, TLR9, TMEF1, TNFa, TNFRSF7, Tp55, TREM1, TSLP, TSLPR, TWEAK, VEGF, VISTA, Vstm3, or WUCAM; VL4 is a fourth immunoglobulin light chain variable region that specifically binds to CD3; VH1 is a first immunoglobulin heavy chain variable region that specifically binds to CD28; VH2 is a second immunoglobulin heavy chain variable region that specifically binds to A2AR, APRIL, ATPDase, BAFF, BAFFR, BCMA, BlyS, BTK, BTLA, B7DC, B7H1, B7H2, B7H3, B7H4, B7H5, B7H6, B7H7, B7RP1, B7-4, C3, C5, CCL2, CCL3, CCL4, CCL5, CCL7, CCL8, CCL11, CCL15, CCL17, CCL19, CCL20, CCL21, CCL25, CCR3, CCR4, CD16A, CD19, CD20, CD24, CD27, CD28, CD30, CD38, CD39, CD40, CD40L, CD47, CD52, CD70, CD80, CD86, CD123, CD133, CD137, CD137L, CD160, CD272, CEACAM5, CLEC9, CLEC91, CRTH2, CSF-1, CSF-2, CSF-3, CXCL1, CXCL2, CXCL4, CXCL12, CXCL13, CXCR3, cMet, CTLA4, DLL3, DLL4, DNGR-1, E-cadherin, EGFR, ENTPD1, EpCAM, FCER1, FCER1A, FCER2, FGFR, FLAP, FOLH1, Gi24, GITR, GITRL, GPR5, GP100, GPRC5D, HER2, HER3, ICOSL, ICOS, HHLA2, HMGB1, HVEM, IDO, IFNa, IgE, IGF1R, IL2Rbeta, IL1, ILIA, IL1B, IL1F10, IL2, IL4, IL4Ra, IL5, IL5R, IL6, IL7, IL7Ra, IL8, IL9, IL9R, IL10, rhILlO, IL12, IL13, IL13Ra1, IL13Ra2, IL15, IL17, IL17Rb, IL18, IL22, IL23, IL25, IL7, IL33, IL35, ITGB4, ITK, KIR, LAG3, LAMP1, leptin, LPFS2, MHC class II, MUC-1, MUC-16, NCR3LG1, NKG2D, NKp46, NTPDase-1, OX40, OX40L, PD-1, PD-L1, PD-L2, PROM1, S152, SIRPalpha, SISP1, SLC, SPG64, ST2, STEAP1, STEAP2, Syk kinase, STEAP1, TROP2, TACI, TDO, TGFBETA, T14, TIGIT, TIM3, TLR, TLR2, TLR4, TLR5, TLR9, TMEF1, TNFa, TNFRSF7, Tp55, TREM1, TSLP, TSLPR, TWEAK, VEGF, VISTA, Vstm3, or WUCAM; VH3 is a third immunoglobulin heavy chain variable region that specifically binds to A2AR, APRIL, ATPDase, BAFF, BAFFR, BCMA, BlyS, BTK, BTLA, B7DC, B7H1, B7H2, B7H3, B7H4, B7H5, B7H6, B7H7, B7RP1, B7-4, C3, C5, CCL2, CCL3, CCL4, CCL5, CCL7, CCL8, CCL11, CCL15, CCL17, CCL19, CCL20, CCL21, CCL25, CCR3, CCR4, CD16A, CD19, CD20, CD24, CD27, CD28, CD30, CD38, CD39, CD40, CD40L, CD47, CD52, CD70, CD80, CD86, CD123, CD133, CD137, CD137L, CD160, CD272, CEACAM5, CLEC9, CLEC91, CRTH2, CSF-1, CSF-2, CSF-3, CXCL1, CXCL2, CXCL4, CXCL12, CXCL13, CXCR3, cMet, CTLA4, DLL3, DLL4, DNGR-1, E-cadherin, EGFR, ENTPD1, EpCAM, FCER1, FCER1A, FCER2, FGFR, FLAP, FOLH1, Gi24, GITR, GITRL, GPR5, GP100, GPRC5D, HER2, HER3, ICOSL, ICOS, HHLA2, HMGB1, HVEM, IDO, IFNa, IgE, IGF1R, IL2Rbeta, IL1, ILIA, IL1B, IL1F10, IL2, IL4, IL4Ra, IL5, IL5R, IL6, IL7, IL7Ra, IL8, IL9, IL9R, IL10, rhILlO, IL12, IL13, IL13Ra1, IL13Ra2, IL15, IL17, IL17Rb, IL18, IL22, IL23, IL25, IL7, IL33, IL35, ITGB4, ITK, KIR, LAG3, LAMP1, leptin, LPFS2, MHC class II, MUC-1, MUC-16, NCR3LG1, NKG2D, NKp46, NTPDase-1, OX40, OX40L, PD-1, PD-L1, PD-L2, PROM1, S152, SIRPalpha, SISP1, SLC, SPG64, ST2, STEAP1, STEAP2, Syk kinase, STEAP1, TROP2, TACI, TDO, TGFBETA, T14, TIGIT, TIM3, TLR, TLR2, TLR4, TLR5, TLR9, TMEF1, TNFa, TNFRSF7, Tp55, TREM1, TSLP, TSLPR, TWEAK, VEGF, VISTA, Vstm3, or WUCAM; VH4 is a fourth immunoglobulin heavy chain variable region that specifically binds to CD3; Fc is a region comprising an immunoglobulin heavy chain constant region 2 (CH2), an immunoglobulin heavy chain constant region 3 (CH3), and optionally, an immunoglobulin hinge; and L1-L16 are amino acid linkers. In some aspects, the first polypeptide has a structure represented by VL1-L1-VL2-L2-VH2-L3-VH1-L4-Fc and the second polypeptide has a structure represented by VL3-L9-VL4-L10-VH4-L11-VH3-L12-Fc. In some aspects, the first polypeptide has a structure represented by VL1-L1-VL2-L2-VH2-L3-VH1-L4-Fc and the second polypeptide has a structure represented by VH3-L13-VH4-L14-VL4-L15-VL3-L16-Fc. In some aspects, the first polypeptide has a structure represented by VH1-L5-VH2-L6-VL2-L7-VL1-L8-Fc and the second polypeptide has a structure represented by VL3-L9-VL4-L10-VH4-L11-VH3-L12-Fc. In some aspects, the first polypeptide has a structure represented by VH1-L5-VH2-L6-VL2-L7-VL1-L8-Fc and the second polypeptide has a structure represented by VH3-L13-VH4-L14-VL4-L15-VL3-L16-Fc. In some aspects, VL2 and VH2 may specifically bind to A2AR, APRIL, ATPDase, BAFF, BAFFR, BCMA, BlyS, BTK, BTLA, B7DC, B7H1, B7H2, B7H3, B7H4, B7H5, B7H6, B7H7, B7RP1, B7-4, C3, C5, CCL2, CCL3, CCL4, CCL5, CCL7, CCL8, CCL11, CCL15, CCL17, CCL19, CCL20, CCL21, CCL25, CCR3, CCR4, CD16A, CD19, CD20, CD24, CD27, CD28, CD30, CD38, CD39, CD40, CD40L, CD47, CD52, CD70, CD80, CD86, CD123, CD133, CD137, CD137L, CD160, CD272, CEACAM5, CLEC9, CLEC91, CRTH2, CSF-1, CSF-2, CSF-3, CXCL1, CXCL2, CXCL4, CXCL12, CXCL13, CXCR3, cMet, CTLA4, DLL3, DLL4, DNGR-1, E-cadherin, EGFR, ENTPD1, EpCAM, FCER1, FCER1A, FCER2, FGFR, FLAP, FOLH1, Gi24, GITR, GITRL, GPR5, GP100, GPRC5D, HER2, HER3, ICOSL, ICOS, HHLA2, HMGB1, HVEM, IDO, IFNa, IgE, IGF1R, IL2Rbeta, IL1, ILIA, IL1B, IL1F10, IL2, IL4, IL4Ra, IL5, IL5R, IL6, IL7, IL7Ra, IL8, IL9, IL9R, IL10, rhILlO, IL12, IL13, IL13Ra1, IL13Ra2, IL15, IL17, IL17Rb, IL18, IL22, IL23, IL25, IL7, IL33, IL35, ITGB4, ITK, KIR, LAG3, LAMP1, leptin, LPFS2, MHC class II, MUC-1, MUC-16, NCR3LG1, NKG2D, NKp46, NTPDase-1, OX40, OX40L, PD-1, PD-L1, PD-L2, PROM1, S152, SIRPalpha, SISP1, SLC, SPG64, ST2, STEAP1, STEAP2, Syk kinase, STEAP1, TROP2, TACI, TDO, TGFBETA, T14, TIGIT, TIM3, TLR, TLR2, TLR4, TLR5, TLR9, TMEF1, TNFa, TNFRSF7, Tp55, TREM1, TSLP, TSLPR, TWEAK, VEGF, VISTA, Vstm3, or WUCAM. In some aspects, VL3 and VH3 may specifically bind to A2AR, APRIL, ATPDase, BAFF, BAFFR, BCMA, BlyS, BTK, BTLA, B7DC, B7H1, B7H2, B7H3, B7H4, B7H5, B7H6, B7H7, B7RP1, B7-4, C3, C5, CCL2, CCL3, CCL4, CCL5, CCL7, CCL8, CCL11, CCL15, CCL17, CCL19, CCL20, CCL21, CCL25, CCR3, CCR4, CD16A, CD19, CD20, CD24, CD27, CD28, CD30, CD38, CD39, CD40, CD40L, CD47, CD52, CD70, CD80, CD86, CD123, CD133, CD137, CD137L, CD160, CD272, CEACAM5, CLEC9, CLEC91, CRTH2, CSF-1, CSF-2, CSF-3, CXCL1, CXCL2, CXCL4, CXCL12, CXCL13, CXCR3, cMet, CTLA4, DLL3, DLL4, DNGR-1, E-cadherin, EGFR, ENTPD1, EpCAM, FCER1, FCER1A, FCER2, FGFR, FLAP, FOLH1, Gi24, GITR, GITRL, GPR5, GP100, GPRC5D, HER2, HER3, ICOSL, ICOS, HHLA2, HMGB1, HVEM, IDO, IFNa, IgE, IGF1R, IL2Rbeta, IL1, ILIA, IL1B, IL1F10, IL2, IL4, IL4Ra, IL5, IL5R, IL6, IL7, IL7Ra, IL8, IL9, IL9R, IL10, rhILlO, IL12, IL13, IL13Ra1, IL13Ra2, IL15, IL17, IL17Rb, IL18, IL22, IL23, IL25, IL7, IL33, IL35, ITGB4, ITK, KIR, LAG3, LAMP1, leptin, LPFS2, MHC class II, MUC-1, MUC-16, NCR3LG1, NKG2D, NKp46, NTPDase-1, OX40, OX40L, PD-1, PD-L1, PD-L2, PROM1, S152, SIRPalpha, SISP1, SLC, SPG64, ST2, STEAP1, STEAP2, Syk kinase, STEAP1, TROP2, TACI, TDO, TGFBETA, T14, TIGIT, TIM3, TLR, TLR2, TLR4, TLR5, TLR9, TMEF1, TNFa, TNFRSF7, Tp55, TREM1, TSLP, TSLPR, TWEAK, VEGF, VISTA, Vstm3, or WUCAM. For example, the antigen binding polypeptide complex may specifically bind CD28, CD3, cMet, and Trop2. For example, the antigen binding polypeptide complex may specifically bind CD28, CD3, CD19, and CD20. For example, VL2 and VH2 may specifically bind to cMet. For example, VL3 and VH3 may specifically bind to cMet. For example, VL2 and VH2 may specifically bind to Trop2. For example, VL3 and VH3 may specifically bind to Trop2. For example, VL2 and VH2 may specifically bind to CD19. For example, VL3 and VH3 may specifically bind to CD19. For example, VL2 and VH2 may specifically bind to CD20. For example, VL3 and VH3 may specifically bind to CD20.

[0188] In some aspects, the invention is directed to an antigen binding polypeptide complex comprising a first polypeptide and a second polypeptide; wherein the first polypeptide has a structure represented by VL1-L1-VL2-L2-VH2-L3-VH1-L4-Fc; or VH1-L5-VH2-L6-VL2-L7-VL1-L8-Fc; wherein the second polypeptide has a structure represented by VL3-L9-VL4-L10-VH4-L11-VH3-L12-Fc; or VH3-L13-VH4-L14-VL4-L15-VL3-L16-Fc; wherein VL1 is a first immunoglobulin light chain variable region that specifically binds to A2AR, APRIL, ATPDase, BAFF, BAFFR, BCMA, BlyS, BTK, BTLA, B7DC, B7H1, B7H2, B7H3, B7H4, B7H5, B7H6, B7H7, B7RP1, B7-4, C3, C5, CCL2, CCL3, CCL4, CCL5, CCL7, CCL8, CCL11, CCL15, CCL17, CCL19, CCL20, CCL21, CCL25, CCR3, CCR4, CD16A, CD19, CD20, CD24, CD27, CD28, CD30, CD38, CD39, CD40, CD40L, CD47, CD52, CD70, CD80, CD86, CD123, CD133, CD137, CD137L, CD160, CD272, CEACAM5, CLEC9, CLEC91, CRTH2, CSF-1, CSF-2, CSF-3, CXCL1, CXCL2, CXCL4, CXCL12, CXCL13, CXCR3, cMet, CTLA4, DLL3, DLL4, DNGR-1, E-cadherin, EGFR, ENTPD1, EpCAM, FCER1, FCER1A, FCER2, FGFR, FLAP, FOLH1, Gi24, GITR, GITRL, GPR5, GP100, GPRC5D, HER2, HER3, ICOSL, ICOS, HHLA2, HMGB1, HVEM, IDO, IFNa, IgE, IGF1R, IL2Rbeta, IL1, ILIA, IL1B, IL1F10, IL2, IL4, IL4Ra, IL5, IL5R, IL6, IL7, IL7Ra, IL8, IL9, IL9R, IL10, rhILlO, IL12, IL13, IL13Ra1, IL13Ra2, IL15, IL17, IL17Rb, IL18, IL22, IL23, IL25, IL7, IL33, IL35, ITGB4, ITK, KIR, LAG3, LAMP1, leptin, LPFS2, MHC class II, MUC-1, MUC-16, NCR3LG1, NKG2D, NKp46, NTPDase-1, OX40, OX40L, PD-1, PD-L1, PD-L2, PROM1, S152, SIRPalpha, SISP1, SLC, SPG64, ST2, STEAP1, STEAP2, Syk kinase, STEAP1, TROP2, TACI, TDO, TGFBETA, T14, TIGIT, TIM3, TLR, TLR2, TLR4, TLR5, TLR9, TMEF1, TNFa, TNFRSF7, Tp55, TREM1, TSLP, TSLPR, TWEAK, VEGF, VISTA, Vstm3, or WUCAM; VL2 is a second immunoglobulin light chain variable region that specifically binds to CD28; VL3 is a third immunoglobulin light chain variable region that specifically binds to A2AR, APRIL, ATPDase, BAFF, BAFFR, BCMA, BlyS, BTK, BTLA, B7DC, B7H1, B7H2, B7H3, B7H4, B7H5, B7H6, B7H7, B7RP1, B7-4, C3, C5, CCL2, CCL3, CCL4, CCL5, CCL7, CCL8, CCL11, CCL15, CCL17, CCL19, CCL20, CCL21, CCL25, CCR3, CCR4, CD16A, CD19, CD20, CD24, CD27, CD28, CD30, CD38, CD39, CD40, CD40L, CD47, CD52, CD70, CD80, CD86, CD123, CD133, CD137, CD137L, CD160, CD272, CEACAM5, CLEC9, CLEC91, CRTH2, CSF-1, CSF-2, CSF-3, CXCL1, CXCL2, CXCL4, CXCL12, CXCL13, CXCR3, cMet, CTLA4, DLL3, DLL4, DNGR-1, E-cadherin, EGFR, ENTPD1, EpCAM, FCER1, FCER1A, FCER2, FGFR, FLAP, FOLH1, Gi24, GITR, GITRL, GPR5, GP100, GPRC5D, HER2, HER3, ICOSL, ICOS, HHLA2, HMGB1, HVEM, IDO, IFNa, IgE, IGF1R, IL2Rbeta, IL1, ILIA, IL1B, IL1F10, IL2, IL4, IL4Ra, IL5, IL5R, IL6, IL7, IL7Ra, IL8, IL9, IL9R, IL10, rhILlO, IL12, IL13, IL13Ra1, IL13Ra2, IL15, IL17, IL17Rb, IL18, IL22, IL23, IL25, IL7, IL33, IL35, ITGB4, ITK, KIR, LAG3, LAMP1, leptin, LPFS2, MHC class II, MUC-1, MUC-16, NCR3LG1, NKG2D, NKp46, NTPDase-1, OX40, OX40L, PD-1, PD-L1, PD-L2, PROM1, 5152, SIRPalpha, SISP1, SLC, SPG64, ST2, STEAP1, STEAP2, Syk kinase, STEAP1, TROP2, TACI, TDO, TGFBETA, T14, TIGIT, TIM3, TLR, TLR2, TLR4, TLR5, TLR9, TMEF1, TNFa, TNFRSF7, Tp55, TREM1, TSLP, TSLPR, TWEAK, VEGF, VISTA, Vstm3, or WUCAM; VL4 is a fourth immunoglobulin light chain variable region that specifically binds to CD3; VH1 is a first immunoglobulin heavy chain variable region that specifically binds to A2AR, APRIL, ATPDase, BAFF, BAFFR, BCMA, BlyS, BTK, BTLA, B7DC, B7H1, B7H2, B7H3, B7H4, B7H5, B7H6, B7H7, B7RP1, B7-4, C3, C5, CCL2, CCL3, CCL4, CCL5, CCL7, CCL8, CCL11, CCL15, CCL17, CCL19, CCL20, CCL21, CCL25, CCR3, CCR4, CD16A, CD19, CD20, CD24, CD27, CD28, CD30, CD38, CD39, CD40, CD40L, CD47, CD52, CD70, CD80, CD86, CD123, CD133, CD137, CD137L, CD160, CD272, CEACAM5, CLEC9, CLEC91, CRTH2, CSF-1, CSF-2, CSF-3, CXCL1, CXCL2, CXCL4, CXCL12, CXCL13, CXCR3, cMet, CTLA4, DLL3, DLL4, DNGR-1, E-cadherin, EGFR, ENTPD1, EpCAM, FCER1, FCER1A, FCER2, FGFR, FLAP, FOLH1, Gi24, GITR, GITRL, GPR5, GP100, GPRC5D, HER2, HER3, ICOSL, ICOS, HHLA2, HMGB1, HVEM, IDO, IFNa, IgE, IGF1R, IL2Rbeta, IL1, ILIA, IL1B, IL1F10, IL2, IL4, IL4Ra, IL5, IL5R, IL6, IL7, IL7Ra, IL8, IL9, IL9R, IL10, rhILlO, IL12, IL13, IL13Ra1, IL13Ra2, IL15, IL17, IL17Rb, IL18, IL22, IL23, IL25, IL7, IL33, IL35, ITGB4, ITK, KIR, LAG3, LAMP1, leptin, LPFS2, MHC class II, MUC-1, MUC-16, NCR3LG1, NKG2D, NKp46, NTPDase-1, OX40, OX40L, PD-1, PD-L1, PD-L2, PROM1, S152, SIRPalpha, SISP1, SLC, SPG64, ST2, STEAP1, STEAP2, Syk kinase, STEAP1, TROP2, TACI, TDO, TGFBETA, T14, TIGIT, TIM3, TLR, TLR2, TLR4, TLR5, TLR9, TMEF1, TNFa, TNFRSF7, Tp55, TREM1, TSLP, TSLPR, TWEAK, VEGF, VISTA, Vstm3, or WUCAM; VH2 is a second immunoglobulin heavy chain variable region that specifically binds to CD28; VH3 is a third immunoglobulin heavy chain variable region that specifically binds to A2AR, APRIL, ATPDase, BAFF, BAFFR, BCMA, BlyS, BTK, BTLA, B7DC, B7H1, B7H2, B7H3, B7H4, B7H5, B7H6, B7H7, B7RP1, B7-4, C3, C5, CCL2, CCL3, CCL4, CCL5, CCL7, CCL8, CCL11, CCL15, CCL17, CCL19, CCL20, CCL21, CCL25, CCR3, CCR4, CD16A, CD19, CD20, CD24, CD27, CD28, CD30, CD38, CD39, CD40, CD40L, CD47, CD52, CD70, CD80, CD86, CD123, CD133, CD137, CD137L, CD160, CD272, CEACAM5, CLEC9, CLEC91, CRTH2, CSF-1, CSF-2, CSF-3, CXCL1, CXCL2, CXCL4, CXCL12, CXCL13, CXCR3, cMet, CTLA4, DLL3, DLL4, DNGR-1, E-cadherin, EGFR, ENTPD1, EpCAM, FCER1, FCER1A, FCER2, FGFR, FLAP, FOLH1, Gi24, GITR, GITRL, GPR5, GP100, GPRC5D, HER2, HER3, ICOSL, ICOS, HHLA2, HMGB1, HVEM, IDO, IFNa, IgE, IGF1R, IL2Rbeta, IL1, ILIA, IL1B, IL1F10, IL2, IL4, IL4Ra, IL5, IL5R, IL6, IL7, IL7Ra, IL8, IL9, IL9R, IL10, rhILlO, IL12, IL13, IL13Ra1, IL13Ra2, IL15, IL17, IL17Rb, IL18, IL22, IL23, IL25, IL7, IL33, IL35, ITGB4, ITK, KIR, LAG3, LAMP1, leptin, LPFS2, MHC class II, MUC-1, MUC-16, NCR3LG1, NKG2D, NKp46, NTPDase-1, OX40, OX40L, PD-1, PD-L1, PD-L2, PROM1, S152, SIRPalpha, SISP1, SLC, SPG64, ST2, STEAP1, STEAP2, Syk kinase, STEAP1, TROP2, TACI, TDO, TGFBETA, T14, TIGIT, TIM3, TLR, TLR2, TLR4, TLR5, TLR9, TMEF1, TNFa, TNFRSF7, Tp55, TREM1, TSLP, TSLPR, TWEAK, VEGF, VISTA, Vstm3, or WUCAM; VH4 is a fourth immunoglobulin heavy chain variable region that specifically binds to CD3; Fc is a region comprising an immunoglobulin heavy chain constant region 2 (CH2), an immunoglobulin heavy chain constant region 3 (CH3), and optionally, an immunoglobulin hinge; and L1-L16 are amino acid linkers. In some aspects, the first polypeptide has a structure represented by VL1-L1-VL2-L2-VH2-L3-VH1-L4-Fc and the second polypeptide has a structure represented by VL3-L9-VL4-L10-VH4-L11-VH3-L12-Fc. In some aspects, the first polypeptide has a structure represented by VL1-L1-VL2-L2-VH2-L3-VH1-L4-Fc and the second polypeptide has a structure represented by VH3-L13-VH4-L14-VL4-L15-VL3-L16-Fc. In some aspects, the first polypeptide has a structure represented by VH1-L5-VH2-L6-VL2-L7-VL1-L8-Fc and the second polypeptide has a structure represented by VL3-L9-VL4-L10-VH4-L11-VH3-L12-Fc. In some aspects, the first polypeptide has a structure represented by VH1-L5-VH2-L6-VL2-L7-VL1-L8-Fc and the second polypeptide has a structure represented by VH3-L13-VH4-L14-VL4-L15-VL3-L16-Fc. In some aspects, VL1 and VH1 may specifically bind to A2AR, APRIL, ATPDase, BAFF, BAFFR, BCMA, BlyS, BTK, BTLA, B7DC, B7H1, B7H2, B7H3, B7H4, B7H5, B7H6, B7H7, B7RP1, B7-4, C3, C5, CCL2, CCL3, CCL4, CCL5, CCL7, CCL8, CCL11, CCL15, CCL17, CCL19, CCL20, CCL21, CCL25, CCR3, CCR4, CD16A, CD19, CD20, CD24, CD27, CD28, CD30, CD38, CD39, CD40, CD40L, CD47, CD52, CD70, CD80, CD86, CD123, CD133, CD137, CD137L, CD160, CD272, CEACAM5, CLEC9, CLEC91, CRTH2, CSF-1, CSF-2, CSF-3, CXCL1, CXCL2, CXCL4, CXCL12, CXCL13, CXCR3, cMet, CTLA4, DLL3, DLL4, DNGR-1, E-cadherin, EGFR, ENTPD1, EpCAM, FCER1, FCER1A, FCER2, FGFR, FLAP, FOLH1, Gi24, GITR, GITRL, GPR5, GP100, GPRC5D, HER2, HER3, ICOSL, ICOS, HHLA2, HMGB1, HVEM, IDO, IFNa, IgE, IGF1R, IL2Rbeta, IL1, ILIA, IL1B, IL1F10, IL2, IL4, IL4Ra, IL5, IL5R, IL6, IL7, IL7Ra, IL8, IL9, IL9R, IL10, rhILlO, IL12, IL13, IL13Ra1, IL13Ra2, IL15, IL17, IL17Rb, IL18, IL22, IL23, IL25, IL7, IL33, IL35, ITGB4, ITK, KIR, LAG3, LAMP1, leptin, LPFS2, MHC class II, MUC-1, MUC-16, NCR3LG1, NKG2D, NKp46, NTPDase-1, OX40, OX40L, PD-1, PD-L1, PD-L2, PROM1, S152, SIRPalpha, SISP1, SLC, SPG64, ST2, STEAP1, STEAP2, Syk kinase, STEAP1, TROP2, TACI, TDO, TGFBETA, T14, TIGIT, TIM3, TLR, TLR2, TLR4, TLR5, TLR9, TMEF1, TNFa, TNFRSF7, Tp55, TREM1, TSLP, TSLPR, TWEAK, VEGF, VISTA, Vstm3, or WUCAM. In some aspects, VL3 and VH3 may specifically bind to A2AR, APRIL, ATPDase, BAFF, BAFFR, BCMA, BlyS, BTK, BTLA, B7DC, B7H1, B7H2, B7H3, B7H4, B7H5, B7H6, B7H7, B7RP1, B7-4, C3, C5, CCL2, CCL3, CCL4, CCL5, CCL7, CCL8, CCL11, CCL15, CCL17, CCL19, CCL20, CCL21, CCL25, CCR3, CCR4, CD16A, CD19, CD20, CD24, CD27, CD28, CD30, CD38, CD39, CD40, CD40L, CD47, CD52, CD70, CD80, CD86, CD123, CD133, CD137, CD137L, CD160, CD272, CEACAM5, CLEC9, CLEC91, CRTH2, CSF-1, CSF-2, CSF-3, CXCL1, CXCL2, CXCL4, CXCL12, CXCL13, CXCR3, cMet, CTLA4, DLL3, DLL4, DNGR-1, E-cadherin, EGFR, ENTPD1, EpCAM, FCER1, FCER1A, FCER2, FGFR, FLAP, FOLH1, Gi24, GITR, GITRL, GPR5, GP100, GPRC5D, HER2, HER3, ICOSL, ICOS, HHLA2, HMGB1, HVEM, IDO, IFNa, IgE, IGF1R, IL2Rbeta, IL1, ILIA, IL1B, IL1F10, IL2, IL4, IL4Ra, IL5, IL5R, IL6, IL7, IL7Ra, IL8, IL9, IL9R, IL10, rhILlO, IL12, IL13, IL13Ra1, IL13Ra2, IL15, IL17, IL17Rb, IL18, IL22, IL23, IL25, IL7, IL33, IL35, ITGB4, ITK, KIR, LAG3, LAMP1, leptin, LPFS2, MHC class II, MUC-1, MUC-16, NCR3LG1, NKG2D, NKp46, NTPDase-1, OX40, OX40L, PD-1, PD-L1, PD-L2, PROM1, S152, SIRPalpha, SISP1, SLC, SPG64, ST2, STEAP1, STEAP2, Syk kinase, STEAP1, TROP2, TACI, TDO, TGFBETA, T14, TIGIT, TIM3, TLR, TLR2, TLR4, TLR5, TLR9, TMEF1, TNFa, TNFRSF7, Tp55, TREM1, TSLP, TSLPR, TWEAK, VEGF, VISTA, Vstm3, or WUCAM. For example, the antigen binding polypeptide complex may specifically bind CD28, CD3, cMet, and Trop2. For example, the antigen binding polypeptide complex may specifically bind CD28, CD3, CD19, and CD20. For example, VL1 and VH1 may specifically bind to cMet. For example, VL3 and VH3 may specifically bind to cMet. For example, VL1 and VH1 may specifically bind to Trop2. For example, VL3 and VH3 may specifically bind to Trop2. For example, VL1 and VH1 may specifically bind to CD19. For example, VL3 and VH3 may specifically bind to CD19. For example, VL1 and VH1 may specifically bind to CD20. For example, VL3 and VH3 may specifically bind to CD20.

[0189] 89) In some aspects, the invention is directed to an antigen binding polypeptide complex comprising a first polypeptide and a second polypeptide; wherein the first polypeptide has a structure represented by VL1-L1-VL2-L2-VH2-L3-VH1-L4-Fc; or VH1-L5-VH2-L6-VL2-L7-VL1-L8-Fc; wherein the second polypeptide has a structure represented by VL3-L9-VL4-L10-VH4-L11-VH3-L12-Fc; or VH3-L13-VH4-L14-VL4-L15-VL3-L16-Fc; wherein VL1 is a first immunoglobulin light chain variable region that specifically binds to A2AR, APRIL, ATPDase, BAFF, BAFFR, BCMA, BlyS, BTK, BTLA, B7DC, B7H1, B7H2, B7H3, B7H4, B7H5, B7H6, B7H7, B7RP1, B7-4, C3, C5, CCL2, CCL3, CCL4, CCL5, CCL7, CCL8, CCL11, CCL15, CCL17, CCL19, CCL20, CCL21, CCL25, CCR3, CCR4, CD16A, CD19, CD20, CD24, CD27, CD28, CD30, CD38, CD39, CD40, CD40L, CD47, CD52, CD70, CD80, CD86, CD123, CD133, CD137, CD137L, CD160, CD272, CEACAM5, CLEC9, CLEC91, CRTH2, CSF-1, CSF-2, CSF-3, CXCL1, CXCL2, CXCL4, CXCL12, CXCL13, CXCR3, cMet, CTLA4, DLL3, DLL4, DNGR-1, E-cadherin, EGFR, ENTPD1, EpCAM, FCER1, FCER1A, FCER2, FGFR, FLAP, FOLH1, Gi24, GITR, GITRL, GPR5, GP100, GPRC5D, HER2, HER3, ICOSL, ICOS, HHLA2, HMGB1, HVEM, IDO, IFNa, IgE, IGF1R, IL2Rbeta, IL1, ILIA, IL1B, IL1F10, IL2, IL4, IL4Ra, IL5, IL5R, IL6, IL7, IL7Ra, IL8, IL9, IL9R, IL10, rhILlO, IL12, IL13, IL13Ra1, IL13Ra2, IL15, IL17, IL17Rb, IL18, IL22, IL23, IL25, IL7, IL33, IL35, ITGB4, ITK, KIR, LAG3, LAMP1, leptin, LPFS2, MHC class II, MUC-1, MUC-16, NCR3LG1, NKG2D, NKp46, NTPDase-1, OX40, OX40L, PD-1, PD-L1, PD-L2, PROM1, S152, SIRPalpha, SISP1, SLC, SPG64, ST2, STEAP1, STEAP2, Syk kinase, STEAP1, TROP2, TACI, TDO, TGFBETA, T14, TIGIT, TIM3, TLR, TLR2, TLR4, TLR5, TLR9, TMEF1, TNFa, TNFRSF7, Tp55, TREM1, TSLP, TSLPR, TWEAK, VEGF, VISTA, Vstm3, or WUCAM; VL2 is a second immunoglobulin light chain variable region that specifically binds to A2AR, APRIL, ATPDase, BAFF, BAFFR, BCMA, BlyS, BTK, BTLA, B7DC, B7H1, B7H2, B7H3, B7H4, B7H5, B7H6, B7H7, B7RP1, B7-4, C3, C5, CCL2, CCL3, CCL4, CCL5, CCL7, CCL8, CCL11, CCL15, CCL17, CCL19, CCL20, CCL21, CCL25, CCR3, CCR4, CD16A, CD19, CD20, CD24, CD27, CD28, CD30, CD38, CD39, CD40, CD40L, CD47, CD52, CD70, CD80, CD86, CD123, CD133, CD137, CD137L, CD160, CD272, CEACAM5, CLEC9, CLEC91, CRTH2, CSF-1, CSF-2, CSF-3, CXCL1, CXCL2, CXCL4, CXCL12, CXCL13, CXCR3, cMet, CTLA4, DLL3, DLL4, DNGR-1, E-cadherin, EGFR, ENTPD1, EpCAM, FCER1, FCER1A, FCER2, FGFR, FLAP, FOLH1, Gi24, GITR, GITRL, GPR5, GP100, GPRC5D, HER2, HER3, ICOSL, ICOS, HHLA2, HMGB1, HVEM, IDO, IFNa, IgE, IGF1R, IL2Rbeta, IL1, ILIA, IL1B, IL1F10, IL2, IL4, IL4Ra, IL5, IL5R, IL6, IL7, IL7Ra, IL8, IL9, IL9R, IL10, rhILlO, IL12, IL13, IL13Ra1, IL13Ra2, IL15, IL17, IL17Rb, IL18, IL22, IL23, IL25, IL7, IL33, IL35, ITGB4, ITK, KIR, LAG3, LAMP1, leptin, LPFS2, MHC class II, MUC-1, MUC-16, NCR3LG1, NKG2D, NKp46, NTPDase-1, OX40, OX40L, PD-1, PD-L1, PD-L2, PROM1, S152, SIRPalpha, SISP1, SLC, SPG64, ST2, STEAP1, STEAP2, Syk kinase, STEAP1, TROP2, TACI, TDO, TGFBETA, T14, TIGIT, TIM3, TLR, TLR2, TLR4, TLR5, TLR9, TMEF1, TNFa, TNFRSF7, Tp55, TREM1, TSLP, TSLPR, TWEAK, VEGF, VISTA, Vstm3, or WUCAM; VL3 is a third immunoglobulin light chain variable region that specifically binds to CD28; VL4 is a fourth immunoglobulin light chain variable region that specifically binds to CD3; VH1 is a first immunoglobulin heavy chain variable region that specifically binds to A2AR, APRIL, ATPDase, BAFF, BAFFR, BCMA, BlyS, BTK, BTLA, B7DC, B7H1, B7H2, B7H3, B7H4, B7H5, B7H6, B7H7, B7RP1, B7-4, C3, C5, CCL2, CCL3, CCL4, CCL5, CCL7, CCL8, CCL11, CCL15, CCL17, CCL19, CCL20, CCL21, CCL25, CCR3, CCR4, CD16A, CD19, CD20, CD24, CD27, CD28, CD30, CD38, CD39, CD40, CD40L, CD47, CD52, CD70, CD80, CD86, CD123, CD133, CD137, CD137L, CD160, CD272, CEACAM5, CLEC9, CLEC91, CRTH2, CSF-1, CSF-2, CSF-3, CXCL1, CXCL2, CXCL4, CXCL12, CXCL13, CXCR3, cMet, CTLA4, DLL3, DLL4, DNGR-1, E-cadherin, EGFR, ENTPD1, EpCAM, FCER1, FCER1A, FCER2, FGFR, FLAP, FOLH1, Gi24, GITR, GITRL, GPR5, GP100, GPRC5D, HER2, HER3, ICOSL, ICOS, HHLA2, HMGB1, HVEM, IDO, IFNa, IgE, IGF1R, IL2Rbeta, IL1, ILIA, IL1B, IL1F10, IL2, IL4, IL4Ra, IL5, IL5R, IL6, IL7, IL7Ra, IL8, IL9, IL9R, IL10, rhILlO, IL12, IL13, IL13Ra1, IL13Ra2, IL15, IL17, IL17Rb, IL18, IL22, IL23, IL25, IL7, IL33, IL35, ITGB4, ITK, KIR, LAG3, LAMP1, leptin, LPFS2, MHC class II, MUC-1, MUC-16, NCR3LG1, NKG2D, NKp46, NTPDase-1, OX40, OX40L, PD-1, PD-L1, PD-L2, PROM1, 5152, SIRPalpha, SISP1, SLC, SPG64, ST2, STEAP1, STEAP2, Syk kinase, STEAP1, TROP2, TACI, TDO, TGFBETA, T14, TIGIT, TIM3, TLR, TLR2, TLR4, TLR5, TLR9, TMEF1, TNFa, TNFRSF7, Tp55, TREM1, TSLP, TSLPR, TWEAK, VEGF, VISTA, Vstm3, or WUCAM; VH2 is a second immunoglobulin heavy chain variable region that specifically binds to A2AR, APRIL, ATPDase, BAFF, BAFFR, BCMA, BlyS, BTK, BTLA, B7DC, B7H1, B7H2, B7H3, B7H4, B7H5, B7H6, B7H7, B7RP1, B7-4, C3, C5, CCL2, CCL3, CCL4, CCL5, CCL7, CCL8, CCL11, CCL15, CCL17, CCL19, CCL20, CCL21, CCL25, CCR3, CCR4, CD16A, CD19, CD20, CD24, CD27, CD28, CD30, CD38, CD39, CD40, CD40L, CD47, CD52, CD70, CD80, CD86, CD123, CD133, CD137, CD137L, CD160, CD272, CEACAM5, CLEC9, CLEC91, CRTH2, CSF-1, CSF-2, CSF-3, CXCL1, CXCL2, CXCL4, CXCL12, CXCL13, CXCR3, cMet, CTLA4, DLL3, DLL4, DNGR-1, E-cadherin, EGFR, ENTPD1, EpCAM, FCER1, FCER1A, FCER2, FGFR, FLAP, FOLH1, Gi24, GITR, GITRL, GPR5, GP100, GPRC5D, HER2, HER3, ICOSL, ICOS, HHLA2, HMGB1, HVEM, IDO, IFNa, IgE, IGF1R, IL2Rbeta, IL1, ILIA, IL1B, IL1F10, IL2, IL4, IL4Ra, IL5, IL5R, IL6, IL7, IL7Ra, IL8, IL9, IL9R, IL10, rhILlO, IL12, IL13, IL13Ra1, IL13Ra2, IL15, IL17, IL17Rb, IL18, IL22, IL23, IL25, IL7, IL33, IL35, ITGB4, ITK, KIR, LAG3, LAMP1, leptin, LPFS2, MHC class II, MUC-1, MUC-16, NCR3LG1, NKG2D, NKp46, NTPDase-1, OX40, OX40L, PD-1, PD-L1, PD-L2, PROM1, S152, SIRPalpha, SISP1, SLC, SPG64, ST2, STEAP1, STEAP2, Syk kinase, STEAP1, TROP2, TACI, TDO, TGFBETA, T14, TIGIT, TIM3, TLR, TLR2, TLR4, TLR5, TLR9, TMEF1, TNFa, TNFRSF7, Tp55, TREM1, TSLP, TSLPR, TWEAK, VEGF, VISTA, Vstm3, or WUCAM; VH3 is a third immunoglobulin heavy chain variable region that specifically binds to CD28; VH4 is a fourth immunoglobulin heavy chain variable region that specifically binds to CD3; Fc is a region comprising an immunoglobulin heavy chain constant region 2 (CH2), an immunoglobulin heavy chain constant region 3 (CH3), and optionally, an immunoglobulin hinge; and L1-L16 are amino acid linkers. In some aspects, the first polypeptide has a structure represented by VL1-L1-VL2-L2-VH2-L3-VH1-L4-Fc and the second polypeptide has a structure represented by VL3-L9-VL4-L10-VH4-L11-VH3-L12-Fc. In some aspects, the first polypeptide has a structure represented by VL1-L1-VL2-L2-VH2-L3-VH1-L4-Fc and the second polypeptide has a structure represented by VH3-L13-VH4-L14-VL4-L15-VL3-L16-Fc. In some aspects, the first polypeptide has a structure represented by VH1-L5-VH2-L6-VL2-L7-VL1-L8-Fc and the second polypeptide has a structure represented by VL3-L9-VL4-L10-VH4-L11-VH3-L12-Fc. In some aspects, the first polypeptide has a structure represented by VH1-L5-VH2-L6-VL2-L7-VL1-L8-Fc and the second polypeptide has a structure represented by VH3-L13-VH4-L14-VL4-L15-VL3-L16-Fc. In some aspects, VL1 and VH1 may specifically bind to A2AR, APRIL, ATPDase, BAFF, BAFFR, BCMA, BlyS, BTK, BTLA, B7DC, B7H1, B7H2, B7H3, B7H4, B7H5, B7H6, B7H7, B7RP1, B7-4, C3, C5, CCL2, CCL3, CCL4, CCL5, CCL7, CCL8, CCL11, CCL15, CCL17, CCL19, CCL20, CCL21, CCL25, CCR3, CCR4, CD16A, CD19, CD20, CD24, CD27, CD28, CD30, CD38, CD39, CD40, CD40L, CD47, CD52, CD70, CD80, CD86, CD123, CD133, CD137, CD137L, CD160, CD272, CEACAM5, CLEC9, CLEC91, CRTH2, CSF-1, CSF-2, CSF-3, CXCL1, CXCL2, CXCL4, CXCL12, CXCL13, CXCR3, cMet, CTLA4, DLL3, DLL4, DNGR-1, E-cadherin, EGFR, ENTPD1, EpCAM, FCER1, FCER1A, FCER2, FGFR, FLAP, FOLH1, Gi24, GITR, GITRL, GPR5, GP100, GPRC5D, HER2, HER3, ICOSL, ICOS, HHLA2, HMGB1, HVEM, IDO, IFNa, IgE, IGF1R, IL2Rbeta, IL1, ILIA, IL1B, IL1F10, IL2, IL4, IL4Ra, IL5, IL5R, IL6, IL7, IL7Ra, IL8, IL9, IL9R, IL10, rhILlO, IL12, IL13, IL13Ra1, IL13Ra2, IL15, IL17, IL17Rb, IL18, IL22, IL23, IL25, IL7, IL33, IL35, ITGB4, ITK, KIR, LAG3, LAMP1, leptin, LPFS2, MHC class II, MUC-1, MUC-16, NCR3LG1, NKG2D, NKp46, NTPDase-1, OX40, OX40L, PD-1, PD-L1, PD-L2, PROM1, S152, SIRPalpha, SISP1, SLC, SPG64, ST2, STEAP1, STEAP2, Syk kinase, STEAP1, TROP2, TACI, TDO, TGFBETA, T14, TIGIT, TIM3, TLR, TLR2, TLR4, TLR5, TLR9, TMEF1, TNFa, TNFRSF7, Tp55, TREM1, TSLP, TSLPR, TWEAK, VEGF, VISTA, Vstm3, or WUCAM. In some aspects, VL2 and VH2 may specifically bind to A2AR, APRIL, ATPDase, BAFF, BAFFR, BCMA, BlyS, BTK, BTLA, B7DC, B7H1, B7H2, B7H3, B7H4, B7H5, B7H6, B7H7, B7RP1, B7-4, C3, C5, CCL2, CCL3, CCL4, CCL5, CCL7, CCL8, CCL11, CCL15, CCL17, CCL19, CCL20, CCL21, CCL25, CCR3, CCR4, CD16A, CD19, CD20, CD24, CD27, CD28, CD30, CD38, CD39, CD40, CD40L, CD47, CD52, CD70, CD80, CD86, CD123, CD133, CD137, CD137L, CD160, CD272, CEACAM5, CLEC9, CLEC91, CRTH2, CSF-1, CSF-2, CSF-3, CXCL1, CXCL2, CXCL4, CXCL12, CXCL13, CXCR3, cMet, CTLA4, DLL3, DLL4, DNGR-1, E-cadherin, EGFR, ENTPD1, EpCAM, FCER1, FCER1A, FCER2, FGFR, FLAP, FOLH1, Gi24, GITR, GITRL, GPR5, GP100, GPRC5D, HER2, HER3, ICOSL, ICOS, HHLA2, HMGB1, HVEM, IDO, IFNa, IgE, IGF1R, IL2Rbeta, IL1, ILIA, IL1B, IL1F10, IL2, IL4, IL4Ra, IL5, IL5R, IL6, IL7, IL7Ra, IL8, IL9, IL9R, IL10, rhILlO, IL12, IL13, IL13Ra1, IL13Ra2, IL15, IL17, IL17Rb, IL18, IL22, IL23, IL25, IL7, IL33, IL35, ITGB4, ITK, KIR, LAG3, LAMP1, leptin, LPFS2, MHC class II, MUC-1, MUC-16, NCR3LG1, NKG2D, NKp46, NTPDase-1, OX40, OX40L, PD-1, PD-L1, PD-L2, PROM1, S152, SIRPalpha, SISP1, SLC, SPG64, ST2, STEAP1, STEAP2, Syk kinase, STEAP1, TROP2, TACI, TDO, TGFBETA, T14, TIGIT, TIM3, TLR, TLR2, TLR4, TLR5, TLR9, TMEF1, TNFa, TNFRSF7, Tp55, TREM1, TSLP, TSLPR, TWEAK, VEGF, VISTA, Vstm3, or WUCAM. For example, the antigen binding polypeptide complex may specifically bind CD28, CD3, cMet, and Trop2. For example, the antigen binding polypeptide complex may specifically bind CD28, CD3, CD19, and CD20. For example, VL1 and VH1 may specifically bind to cMet. For example, VL2 and VH2 may specifically bind to cMet. For example, VL1 and VH1 may specifically bind to Trop2. For example, VL2 and VH2 may specifically bind to Trop2. For example, VL1 and VH1 may specifically bind to CD19. For example, VL2 and VH2 may specifically bind to CD19. For example, VL1 and VH1 may specifically bind to CD20. For example, VL2 and VH2 may specifically bind to CD20.

[0190] In some aspects of the antigen binding polypeptide complex described herein, VL4 and VH4 specifically bind to CD3, VL3 and VH3 specifically bind to CD28, VL2 and VH2 specifically bind to Trop2, and VL1 and VH1 specifically bind to cMet. In some aspects, VL4 and VH4 specifically bind to CD3, VL3 and VH3 specifically bind to CD28, VL2 and VH2 specifically bind to cMet, and VL1 and VH1 specifically bind to Trop2. In some aspects, VL4 and VH4 specifically bind to CD3, VL3 and VH3 specifically bind to Trop2, VL2 and VH2 specifically bind to CD28, and VL1 and VH1 specifically bind to cMet. In some aspects, VL4 and VH4 specifically bind to CD3, VL3 and VH3 specifically bind to Trop2, VL2 and VH2 specifically bind to cMet, and VL1 and VH1 specifically bind to CD28. In some aspects, VL4 and VH4 specifically bind to CD3, VL3 and VH3 specifically bind to cMet, VL2 and VH2 specifically bind to Trop2, and VL1 and VH1 specifically bind to CD28. In some aspects, VL4 and VH4 specifically bind to CD3, VL3 and VH3 specifically bind to cMet, VL2 and VH2 specifically bind to Trop2, and VL1 and VH1 specifically bind to CD28. In some aspects, VL4 and VH4 specifically bind to CD3, VL3 and VH3 specifically bind to CD28, VL2 and VH2 specifically bind to CD20, and VL1 and VH1 specifically bind to CD19. In some aspects, VL4 and VH4 specifically bind to CD3, VL3 and VH3 specifically bind to CD28, VL2 and VH2 specifically bind to CD19, and VL1 and VH1 specifically bind to CD20. In some aspects, VL4 and VH4 specifically bind to CD3, VL3 and VH3 specifically bind to CD20, VL2 and VH2 specifically bind to CD28, and VL1 and VH1 specifically bind to CD19. In some aspects, VL4 and VH4 specifically bind to CD3, VL3 and VH3 specifically bind to CD20, VL2 and VH2 specifically bind to CD19, and VL1 and VH1 specifically bind to CD28. In some aspects, VL4 and VH4 specifically bind to CD3, VL3 and VH3 specifically bind to CD19, VL2 and VH2 specifically bind to CD20, and VL1 and VH1 specifically bind to CD28. In some aspects, VL4 and VH4 specifically bind to CD3, VL3 and VH3 specifically bind to CD19, VL2 and VH2 specifically bind to CD28, and VL1 and VH1 specifically bind to CD20.

[0191] In some aspects, the invention is directed to an antigen binding polypeptide complex comprising a first polypeptide and a second polypeptide; wherein the first polypeptide has a structure represented by VL1-L1-VL2-L2-VH2-L3-VH1-L4-CH1-L5-Fc; VH1-L6-VH2-L7-VL2-L8-VL1-L9-CH1-L10-Fc; VL1-L11-VL2-L12-VH2-L13-VH1-L14-CL-L15-Fc; VH1-L16-VH2-L17-VL2-L18-VL1-L19-CL-L20-Fc; VL1-L21-VL2-L22-VH2-L23-VH1-L24-CH1-L25-CL-L26-Fc; VH1-L27-VH2-L28-VL2-L29-VL1-L30-CH1-L31-CL-L32-Fc; VL1-L33-VL2-L34-VH2-L35-VH1-L36-CL-L37-CH1-L38-Fc; or VH1-L39-VH2-L40-VL2-L41-VL1-L42-CL-L43-CH1-L44-Fc; wherein the second polypeptide has a structure represented by VL3-L45-VL4-L46-VH4-L47-VH3-L48-CH1-L49-Fc; VH3-L50-VH4-L51-VL4-L52-VL3-L53-CH1-L54-Fc; VL3-L55-VL4-L56-VH4-L57-VH3-L58-CL-L59-Fc; VH3-L60-VH4-L61-VL4-L62-VL3-L63-CL-L64-Fc; VL3-L65-VL4-L66-VH4-L67-VH3-L68-CH1-L69-CL-L70-Fc; VH3-L71-VH4-L72-VL4-L73-VL3-L74-CH1-L75-CL-L76-Fc; VL3-L77-VL4-L78-VH4-L79-VH3-L80-CL-L81-CH1-L82-Fc; or VH3-L83-VH4-L84-VL4-L85-VL3-L86-CL-L87-CH1-L88-Fc; wherein VL1 is a first immunoglobulin light chain variable region that specifically binds to A2AR, APRIL, ATPDase, BAFF, BAFFR, BCMA, BlyS, BTK, BTLA, B7DC, B7H1, B7H2, B7H3, B7H4, B7H5, B7H6, B7H7, B7RP1, B7-4, C3, C5, CCL2, CCL3, CCL4, CCL5, CCL7, CCL8, CCL11, CCL15, CCL17, CCL19, CCL20, CCL21, CCL25, CCR3, CCR4, CD16A, CD19, CD20, CD24, CD27, CD28, CD30, CD38, CD39, CD40, CD40L, CD47, CD52, CD70, CD80, CD86, CD123, CD133, CD137, CD137L, CD160, CD272, CEACAM5, CLEC9, CLEC91, CRTH2, CSF-1, CSF-2, CSF-3, CXCL1, CXCL2, CXCL4, CXCL12, CXCL13, CXCR3, cMet, CTLA4, DLL3, DLL4, DNGR-1, E-cadherin, EGFR, ENTPD1, EpCAM, FCER1, FCER1A, FCER2, FGFR, FLAP, FOLH1, Gi24, GITR, GITRL, GPR5, GP100, GPRC5D, HER2, HER3, ICOSL, ICOS, HHLA2, HMGB1, HVEM, IDO, IFNa, IgE, IGF1R, IL2Rbeta, IL1, ILIA, IL1B, IL1F10, IL2, IL4, IL4Ra, IL5, IL5R, IL6, IL7, IL7Ra, IL8, IL9, IL9R, IL10, rhILlO, IL12, IL13, IL13Ra1, IL13Ra2, IL15, IL17, IL17Rb, IL18, IL22, IL23, IL25, IL7, IL33, IL35, ITGB4, ITK, KIR, LAG3, LAMP1, leptin, LPFS2, MHC class II, MUC-1, MUC-16, NCR3LG1, NKG2D, NKp46, NTPDase-1, OX40, OX40L, PD-1, PD-L1, PD-L2, PROM1, S152, SIRPalpha, SISP1, SLC, SPG64, ST2, STEAP1, STEAP2, Syk kinase, STEAP1, TROP2, TACI, TDO, TGFBETA, T14, TIGIT, TIM3, TLR, TLR2, TLR4, TLR5, TLR9, TMEF1, TNFa, TNFRSF7, Tp55, TREM1, TSLP, TSLPR, TWEAK, VEGF, VISTA, Vstm3, or WUCAM; VL2 is a second immunoglobulin light chain variable region that specifically binds to A2AR, APRIL, ATPDase, BAFF, BAFFR, BCMA, BlyS, BTK, BTLA, B7DC, B7H1, B7H2, B7H3, B7H4, B7H5, B7H6, B7H7, B7RP1, B7-4, C3, C5, CCL2, CCL3, CCL4, CCL5, CCL7, CCL8, CCL11, CCL15, CCL17, CCL19, CCL20, CCL21, CCL25, CCR3, CCR4, CD16A, CD19, CD20, CD24, CD27, CD28, CD30, CD38, CD39, CD40, CD40L, CD47, CD52, CD70, CD80, CD86, CD123, CD133, CD137, CD137L, CD160, CD272, CEACAM5, CLEC9, CLEC91, CRTH2, CSF-1, CSF-2, CSF-3, CXCL1, CXCL2, CXCL4, CXCL12, CXCL13, CXCR3, cMet, CTLA4, DLL3, DLL4, DNGR-1, E-cadherin, EGFR, ENTPD1, EpCAM, FCER1, FCER1A, FCER2, FGFR, FLAP, FOLH1, Gi24, GITR, GITRL, GPR5, GP100, GPRC5D, HER2, HER3, ICOSL, ICOS, HHLA2, HMGB1, HVEM, IDO, IFNa, IgE, IGF1R, IL2Rbeta, IL1, ILIA, IL1B, IL1F10, IL2, IL4, IL4Ra, IL5, IL5R, IL6, IL7, IL7Ra, IL8, IL9, IL9R, IL10, rhILlO, IL12, IL13, IL13Ra1, IL13Ra2, IL15, IL17, IL17Rb, IL18, IL22, IL23, IL25, IL7, IL33, IL35, ITGB4, ITK, KIR, LAG3, LAMP1, leptin, LPFS2, MHC class II, MUC-1, MUC-16, NCR3LG1, NKG2D, NKp46, NTPDase-1, OX40, OX40L, PD-1, PD-L1, PD-L2, PROM1, S152, SIRPalpha, SISP1, SLC, SPG64, ST2, STEAP1, STEAP2, Syk kinase, STEAP1, TROP2, TACI, TDO, TGFBETA, T14, TIGIT, TIM3, TLR, TLR2, TLR4, TLR5, TLR9, TMEF1, TNFa, TNFRSF7, Tp55, TREM1, TSLP, TSLPR, TWEAK, VEGF, VISTA, Vstm3, or WUCAM; VL3 is a third immunoglobulin light chain variable region that specifically binds to CD3; VL4 is a fourth immunoglobulin light chain variable region that specifically binds to A2AR, APRIL, ATPDase, BAFF, BAFFR, BCMA, BlyS, BTK, BTLA, B7DC, B7H1, B7H2, B7H3, B7H4, B7H5, B7H6, B7H7, B7RP1, B7-4, C3, C5, CCL2, CCL3, CCL4, CCL5, CCL7, CCL8, CCL11, CCL15, CCL17, CCL19, CCL20, CCL21, CCL25, CCR3, CCR4, CD16A, CD19, CD20, CD24, CD27, CD28, CD30, CD38, CD39, CD40, CD40L, CD47, CD52, CD70, CD80, CD86, CD123, CD133, CD137, CD137L, CD160, CD272, CEACAM5, CLEC9, CLEC91, CRTH2, CSF-1, CSF-2, CSF-3, CXCL1, CXCL2, CXCL4, CXCL12, CXCL13, CXCR3, cMet, CTLA4, DLL3, DLL4, DNGR-1, E-cadherin, EGFR, ENTPD1, EpCAM, FCER1, FCER1A, FCER2, FGFR, FLAP, FOLH1, Gi24, GITR, GITRL, GPR5, GP100, GPRC5D, HER2, HER3, ICOSL, ICOS, HHLA2, HMGB1, HVEM, IDO, IFNa, IgE, IGF1R, IL2Rbeta, IL1, ILIA, IL1B, IL1F10, IL2, IL4, IL4Ra, IL5, IL5R, IL6, IL7, IL7Ra, IL8, IL9, IL9R, IL10, rhILlO, IL12, IL13, IL13Ra1, IL13Ra2, IL15, IL17, IL17Rb, IL18, IL22, IL23, IL25, IL7, IL33, IL35, ITGB4, ITK, KIR, LAG3, LAMP1, leptin, LPFS2, MHC class II, MUC-1, MUC-16, NCR3LG1, NKG2D, NKp46, NTPDase-1, OX40, OX40L, PD-1, PD-L1, PD-L2, PROM1, S152, SIRPalpha, SISP1, SLC, SPG64, ST2, STEAP1, STEAP2, Syk kinase, STEAP1, TROP2, TACI, TDO, TGFBETA, T14, TIGIT, TIM3, TLR, TLR2, TLR4, TLR5, TLR9, TMEF1, TNFa, TNFRSF7, Tp55, TREM1, TSLP, TSLPR, TWEAK, VEGF, VISTA, Vstm3, or WUCAM; VH1 is a first immunoglobulin heavy chain variable region that specifically binds to A2AR, APRIL, ATPDase, BAFF, BAFFR, BCMA, BlyS, BTK, BTLA, B7DC, B7H1, B7H2, B7H3, B7H4, B7H5, B7H6, B7H7, B7RP1, B7-4, C3, C5, CCL2, CCL3, CCL4, CCL5, CCL7, CCL8, CCL11, CCL15, CCL17, CCL19, CCL20, CCL21, CCL25, CCR3, CCR4, CD16A, CD19, CD20, CD24, CD27, CD28, CD30, CD38, CD39, CD40, CD40L, CD47, CD52, CD70, CD80, CD86, CD123, CD133, CD137, CD137L, CD160, CD272, CEACAM5, CLEC9, CLEC91, CRTH2, CSF-1, CSF-2, CSF-3, CXCL1, CXCL2, CXCL4, CXCL12, CXCL13, CXCR3, cMet, CTLA4, DLL3, DLL4, DNGR-1, E-cadherin, EGFR, ENTPD1, EpCAM, FCER1, FCER1A, FCER2, FGFR, FLAP, FOLH1, Gi24, GITR, GITRL, GPR5, GP100, GPRC5D, HER2, HER3, ICOSL, ICOS, HHLA2, HMGB1, HVEM, IDO, IFNa, IgE, IGF1R, IL2Rbeta, IL1, ILIA, IL1B, IL1F10, IL2, IL4, IL4Ra, IL5, IL5R, IL6, IL7, IL7Ra, IL8, IL9, IL9R, IL10, rhILlO, IL12, IL13, IL13Ra1, IL13Ra2, IL15, IL17, IL17Rb, IL18, IL22, IL23, IL25, IL7, IL33, IL35, ITGB4, ITK, KIR, LAG3, LAMP1, leptin, LPFS2, MHC class II, MUC-1, MUC-16, NCR3LG1, NKG2D, NKp46, NTPDase-1, OX40, OX40L, PD-1, PD-L1, PD-L2, PROM1, S152, SIRPalpha, SISP1, SLC, SPG64, ST2, STEAP1, STEAP2, Syk kinase, STEAP1, TROP2, TACI, TDO, TGFBETA, T14, TIGIT, TIM3, TLR, TLR2, TLR4, TLR5, TLR9, TMEF1, TNFa, TNFRSF7, Tp55, TREM1, TSLP, TSLPR, TWEAK, VEGF, VISTA, Vstm3, or WUCAM; VH2 is a second immunoglobulin heavy chain variable region that specifically binds to A2AR, APRIL, ATPDase, BAFF, BAFFR, BCMA, BlyS, BTK, BTLA, B7DC, B7H1, B7H2, B7H3, B7H4, B7H5, B7H6, B7H7, B7RP1, B7-4, C3, C5, CCL2, CCL3, CCL4, CCL5, CCL7, CCL8, CCL11, CCL15, CCL17, CCL19, CCL20, CCL21, CCL25, CCR3, CCR4, CD16A, CD19, CD20, CD24, CD27, CD28, CD30, CD38, CD39, CD40, CD40L, CD47, CD52, CD70, CD80, CD86, CD123, CD133, CD137, CD137L, CD160, CD272, CEACAM5, CLEC9, CLEC91, CRTH2, CSF-1, CSF-2, CSF-3, CXCL1, CXCL2, CXCL4, CXCL12, CXCL13, CXCR3, cMet, CTLA4, DLL3, DLL4, DNGR-1, E-cadherin, EGFR, ENTPD1, EpCAM, FCER1, FCER1A, FCER2, FGFR, FLAP, FOLH1, Gi24, GITR, GITRL, GPR5, GP100, GPRC5D, HER2, HER3, ICOSL, ICOS, HHLA2, HMGB1, HVEM, IDO, IFNa, IgE, IGF1R, IL2Rbeta, IL1, ILIA, IL1B, IL1F10, IL2, IL4, IL4Ra, IL5, IL5R, IL6, IL7, IL7Ra, IL8, IL9, IL9R, IL10, rhILlO, IL12, IL13, IL13Ra1, IL13Ra2, IL15, IL17, IL17Rb, IL18, IL22, IL23, IL25, IL7, IL33, IL35, ITGB4, ITK, KIR, LAG3, LAMP1, leptin, LPFS2, MHC class II, MUC-1, MUC-16, NCR3LG1, NKG2D, NKp46, NTPDase-1, OX40, OX40L, PD-1, PD-L1, PD-L2, PROM1, S152, SIRPalpha, SISP1, SLC, SPG64, ST2, STEAP1, STEAP2, Syk kinase, STEAP1, TROP2, TACI, TDO, TGFBETA, T14, TIGIT, TIM3, TLR, TLR2, TLR4, TLR5, TLR9, TMEF1, TNFa, TNFRSF7, Tp55, TREM1, TSLP, TSLPR, TWEAK, VEGF, VISTA, Vstm3, or WUCAM; VH3 is a third immunoglobulin heavy chain variable region that specifically binds to CD3; VH4 is a fourth immunoglobulin heavy chain variable region that specifically binds to A2AR, APRIL, ATPDase, BAFF, BAFFR, BCMA, BlyS, BTK, BTLA, B7DC, B7H1, B7H2, B7H3, B7H4, B7H5, B7H6, B7H7, B7RP1, B7-4, C3, C5, CCL2, CCL3, CCL4, CCL5, CCL7, CCL8, CCL11, CCL15, CCL17, CCL19, CCL20, CCL21, CCL25, CCR3, CCR4, CD16A, CD19, CD20, CD24, CD27, CD28, CD30, CD38, CD39, CD40, CD40L, CD47, CD52, CD70, CD80, CD86, CD123, CD133, CD137, CD137L, CD160, CD272, CEACAM5, CLEC9, CLEC91, CRTH2, CSF-1, CSF-2, CSF-3, CXCL1, CXCL2, CXCL4, CXCL12, CXCL13, CXCR3, cMet, CTLA4, DLL3, DLL4, DNGR-1, E-cadherin, EGFR, ENTPD1, EpCAM, FCER1, FCER1A, FCER2, FGFR, FLAP, FOLH1, Gi24, GITR, GITRL, GPR5, GP100, GPRC5D, HER2, HER3, ICOSL, ICOS, HHLA2, HMGB1, HVEM, IDO, IFNa, IgE, IGF1R, IL2Rbeta, IL1, ILIA, IL1B, IL1F10, IL2, IL4, IL4Ra, IL5, IL5R, IL6, IL7, IL7Ra, IL8, IL9, IL9R, IL10, rhILlO, IL12, IL13, IL13Ra1, IL13Ra2, IL15, IL17, IL17Rb, IL18, IL22, IL23, IL25, IL7, IL33, IL35, ITGB4, ITK, KIR, LAG3, LAMP1, leptin, LPFS2, MHC class II, MUC-1, MUC-16, NCR3LG1, NKG2D, NKp46, NTPDase-1, OX40, OX40L, PD-1, PD-L1, PD-L2, PROM1, S152, SIRPalpha, SISP1, SLC, SPG64, ST2, STEAP1, STEAP2, Syk kinase, STEAP1, TROP2, TACI, TDO, TGFBETA, T14, TIGIT, TIM3, TLR, TLR2, TLR4, TLR5, TLR9, TMEF1, TNFa, TNFRSF7, Tp55, TREM1, TSLP, TSLPR, TWEAK, VEGF, VISTA, Vstm3, or WUCAM; Fc is a region comprising an immunoglobulin heavy chain constant region 2 (CH2), an immunoglobulin heavy chain constant region 3 (CH3), and optionally, an immunoglobulin hinge; CH1 is an immunoglobulin heavy chain constant region 1; CL is an immunoglobulin light chain constant region; and L1-L88 are amino acid linkers. In some aspects, the first polypeptide has a structure represented by VL1-L1-VL2-L2-VH2-L3-VH1-L4-CH1-L5-Fc; VH1-L6-VH2-L7-VL2-L8-VL1-L9-CH1-L10-Fc; VL1-L11-VL2-L12-VH2-L13-VH1-L14-CL-L15-Fc; VH1-L16-VH2-L17-VL2-L18-VL1-L19-CL-L20-Fc; VL1-L21-VL2-L22-VH2-L23-VH1-L24-CH1-L25-CL-L26-Fc; VH1-L27-VH2-L28-VL2-L29-VL1-L30-CH1-L31-CL-L32-Fc; VL1-L33-VL2-L34-VH2-L35-VH1-L36-CL-L37-CH1-L38-Fc; or VH1-L39-VH2-L40-VL2-L41-VL1-L42-CL-L43-CH1-L44-Fc and the second polypeptide has a structure represented by VL3-L45-VL4-L46-VH4-L47-VH3-L48-CH1-L49-Fc. In some aspects, the first polypeptide has a structure represented by VL1-L1-VL2-L2-VH2-L3-VH1-L4-CH1-L5-Fc; VH1-L6-VH2-L7-VL2-L8-VL1-L9-CH1-L10-Fc; VL1-L11-VL2-L12-VH2-L13-VH1-L14-CL-L15-Fc; VH1-L16-VH2-L17-VL2-L18-VL1-L19-CL-L20-Fc; VL1-L21-VL2-L22-VH2-L23-VH1-L24-CH1-L25-CL-L26-Fc; VH1-L27-VH2-L28-VL2-L29-VL1-L30-CH1-L31-CL-L32-Fc; VL1-L33-VL2-L34-VH2-L35-VH1-L36-CL-L37-CH1-L38-Fc; or VH1-L39-VH2-L40-VL2-L41-VL1-L42-CL-L43-CH1-L44-Fc and the second polypeptide has a structure represented by VH3-L50-VH4-L51-VL4-L52-VL3-L53-CH1-L54-Fc. In some aspects, the first polypeptide has a structure represented by VL1-L1-VL2-L2-VH2-L3-VH1-L4-CH1-L5-Fc; VH1-L6-VH2-L7-VL2-L8-VL1-L9-CH1-L10-Fc; VL1-L11-VL2-L12-VH2-L13-VH1-L14-CL-L15-Fc; VH1-L16-VH2-L17-VL2-L18-VL1-L19-CL-L20-Fc; VL1-L21-VL2-L22-VH2-L23-VH1-L24-CH1-L25-CL-L26-Fc; VH1-L27-VH2-L28-VL2-L29-VL1-L30-CH1-L31-CL-L32-Fc; VL1-L33-VL2-L34-VH2-L35-VH1-L36-CL-L37-CH1-L38-Fc; or VH1-L39-VH2-L40-VL2-L41-VL1-L42-CL-L43-CH1-L44-Fc and the second polypeptide has a structure represented by VL3-L55-VL4-L56-VH4-L57-VH3-L58-CL-L59-Fc. In some aspects, the first polypeptide has a structure represented by VL1-L1-VL2-L2-VH2-L3-VH1-L4-CH1-L5-Fc; VH1-L6-VH2-L7-VL2-L8-VL1-L9-CH1-L10-Fc; VL1-L11-VL2-L12-VH2-L13-VH1-L14-CL-L15-Fc; VH1-L16-VH2-L17-VL2-L18-VL1-L19-CL-L20-Fc; VL1-L21-VL2-L22-VH2-L23-VH1-L24-CH1-L25-CL-L26-Fc; VH1-L27-VH2-L28-VL2-L29-VL1-L30-CH1-L31-CL-L32-Fc; VL1-L33-VL2-L34-VH2-L35-VH1-L36-CL-L37-CH1-L38-Fc; or VH1-L39-VH2-L40-VL2-L41-VL1-L42-CL-L43-CH1-L44-Fc and the second polypeptide has a structure represented by VH3-L60-VH4-L61-VL4-L62-VL3-L63-CL-L64-Fc. In some aspects, the first polypeptide has a structure represented by VL1-L1-VL2-L2-VH2-L3-VH1-L4-CH1-L5-Fc; VH1-L6-VH2-L7-VL2-L8-VL1-L9-CH1-L10-Fc; VL1-L11-VL2-L12-VH2-L13-VH1-L14-CL-L15-Fc; VH1-L16-VH2-L17-VL2-L18-VL1-L19-CL-L20-Fc; VL1-L21-VL2-L22-VH2-L23-VH1-L24-CH1-L25-CL-L26-Fc; VH1-L27-VH2-L28-VL2-L29-VL1-L30-CH1-L31-CL-L32-Fc; VL1-L33-VL2-L34-VH2-L35-VH1-L36-CL-L37-CH1-L38-Fc; or VH1-L39-VH2-L40-VL2-L41-VL1-L42-CL-L43-CH1-L44-Fc and the second polypeptide has a structure represented by VL3-L65-VL4-L66-VH4-L67-VH3-L68-CH1-L69-CL-L70-Fc. In some aspects, the first polypeptide has a structure represented by VL1-L1-VL2-L2-VH2-L3-VH1-L4-CH1-L5-Fc; VH1-L6-VH2-L7-VL2-L8-VL1-L9-CH1-L10-Fc; VL1-L11-VL2-L12-VH2-L13-VH1-L14-CL-L15-Fc; VH1-L16-VH2-L17-VL2-L18-VL1-L19-CL-L20-Fc; VL1-L21-VL2-L22-VH2-L23-VH1-L24-CH1-L25-CL-L26-Fc; VH1-L27-VH2-L28-VL2-L29-VL1-L30-CH1-L31-CL-L32-Fc; VL1-L33-VL2-L34-VH2-L35-VH1-L36-CL-L37-CH1-L38-Fc; or VH1-L39-VH2-L40-VL2-L41-VL1-L42-CL-L43-CH1-L44-Fc and the second polypeptide has a structure represented by VH3-L71-VH4-L72-VL4-L73-VL3-L74-CH1-L75-CL-L76-Fc. In some aspects, the first polypeptide has a structure represented by VL1-L1-VL2-L2-VH2-L3-VH1-L4-CH1-L5-Fc; VH1-L6-VH2-L7-VL2-L8-VL1-L9-CH1-L10-Fc; VL1-L11-VL2-L12-VH2-L13-VH1-L14-CL-L15-Fc; VH1-L16-VH2-L17-VL2-L18-VL1-L19-CL-L20-Fc; VL1-L21-VL2-L22-VH2-L23-VH1-L24-CH1-L25-CL-L26-Fc; VH1-L27-VH2-L28-VL2-L29-VL1-L30-CH1-L31-CL-L32-Fc; VL1-L33-VL2-L34-VH2-L35-VH1-L36-CL-L37-CH1-L38-Fc; or VH1-L39-VH2-L40-VL2-L41-VL1-L42-CL-L43-CH1-L44-Fc and the second polypeptide has a structure represented by VL3-L77-VL4-L78-VH4-L79-VH3-L80-CL-L81-CH1-L82-Fc. In some aspects, the first polypeptide has a structure represented by VL1-L1-VL2-L2-VH2-L3-VH1-L4-CH1-L5-Fc; VH1-L6-VH2-L7-VL2-L8-VL1-L9-CH1-L10-Fc; VL1-L11-VL2-L12-VH2-L13-VH1-L14-CL-L15-Fc; VH1-L16-VH2-L17-VL2-L18-VL1-L19-CL-L20-Fc; VL1-L21-VL2-L22-VH2-L23-VH1-L24-CH1-L25-CL-L26-Fc; VH1-L27-VH2-L28-VL2-L29-VL1-L30-CH1-L31-CL-L32-Fc; VL1-L33-VL2-L34-VH2-L35-VH1-L36-CL-L37-CH1-L38-Fc; or VH1-L39-VH2-L40-VL2-L41-VL1-L42-CL-L43-CH1-L44-Fc and the second polypeptide has a structure represented by VH3-L83-VH4-L84-VL4-L85-VL3-L86-CL-L87-CH1-L88-Fc. In some aspects, VL1 and VH1 specifically bind to A2AR, APRIL, ATPDase, BAFF, BAFFR, BCMA, BlyS, BTK, BTLA, B7DC, B7H1, B7H2, B7H3, B7H4, B7H5, B7H6, B7H7, B7RP1, B7-4, C3, C5, CCL2, CCL3, CCL4, CCL5, CCL7, CCL8, CCL11, CCL15, CCL17, CCL19, CCL20, CCL21, CCL25, CCR3, CCR4, CD16A, CD19, CD20, CD24, CD27, CD28, CD30, CD38, CD39, CD40, CD40L, CD47, CD52, CD70, CD80, CD86, CD123, CD133, CD137, CD137L, CD160, CD272, CEACAM5, CLEC9, CLEC91, CRTH2, CSF-1, CSF-2, CSF-3, CXCL1, CXCL2, CXCL4, CXCL12, CXCL13, CXCR3, cMet, CTLA4, DLL3, DLL4, DNGR-1, E-cadherin, EGFR, ENTPD1, EpCAM, FCER1, FCER1A, FCER2, FGFR, FLAP, FOLH1, Gi24, GITR, GITRL, GPR5, GP100, GPRC5D, HER2, HER3, ICOSL, ICOS, HHLA2, HMGB1, HVEM, IDO, IFNa, IgE, IGF1R, IL2Rbeta, IL1, ILIA, IL1B, IL1F10, IL2, IL4, IL4Ra, IL5, IL5R, IL6, IL7, IL7Ra, IL8, IL9, IL9R, IL10, rhILlO, IL12, IL13, IL13Ra1, IL13Ra2, IL15, IL17, IL17Rb, IL18, IL22, IL23, IL25, IL7, IL33, IL35, ITGB4, ITK, KIR, LAG3, LAMP1, leptin, LPFS2, MHC class II, MUC-1, MUC-16, NCR3LG1, NKG2D, NKp46, NTPDase-1, OX40, OX40L, PD-1, PD-L1, PD-L2, PROM1, 5152, SIRPalpha, SISP1, SLC, SPG64, ST2, STEAP1, STEAP2, Syk kinase, STEAP1, TROP2, TACI, TDO, TGFBETA, T14, TIGIT, TIM3, TLR, TLR2, TLR4, TLR5, TLR9, TMEF1, TNFa, TNFRSF7, Tp55, TREM1, TSLP, TSLPR, TWEAK, VEGF, VISTA, Vstm3, or WUCAM. In some aspects, VL2 and VH2 specifically bind to A2AR, APRIL, ATPDase, BAFF, BAFFR, BCMA, BlyS, BTK, BTLA, B7DC, B7H1, B7H2, B7H3, B7H4, B7H5, B7H6, B7H7, B7RP1, B7-4, C3, C5, CCL2, CCL3, CCL4, CCL5, CCL7, CCL8, CCL11, CCL15, CCL17, CCL19, CCL20, CCL21, CCL25, CCR3, CCR4, CD16A, CD19, CD20, CD24, CD27, CD28, CD30, CD38, CD39, CD40, CD40L, CD47, CD52, CD70, CD80, CD86, CD123, CD133, CD137, CD137L, CD160, CD272, CEACAM5, CLEC9, CLEC91, CRTH2, CSF-1, CSF-2, CSF-3, CXCL1, CXCL2, CXCL4, CXCL12, CXCL13, CXCR3, cMet, CTLA4, DLL3, DLL4, DNGR-1, E-cadherin, EGFR, ENTPD1, EpCAM, FCER1, FCER1A, FCER2, FGFR, FLAP, FOLH1, Gi24, GITR, GITRL, GPR5, GP100, GPRC5D, HER2, HER3, ICOSL, ICOS, HHLA2, HMGB1, HVEM, IDO, IFNa, IgE, IGF1R, IL2Rbeta, IL1, ILIA, IL1B, IL1F10, IL2, IL4, IL4Ra, IL5, IL5R, IL6, IL7, IL7Ra, IL8, IL9, IL9R, IL10, rhILlO, IL12, IL13, IL13Ra1, IL13Ra2, IL15, IL17, IL17Rb, IL18, IL22, IL23, IL25, IL7, IL33, IL35, ITGB4, ITK, KIR, LAG3, LAMP1, leptin, LPFS2, MHC class II, MUC-1, MUC-16, NCR3LG1, NKG2D, NKp46, NTPDase-1, OX40, OX40L, PD-1, PD-L1, PD-L2, PROM1, 5152, SIRPalpha, SISP1, SLC, SPG64, ST2, STEAP1, STEAP2, Syk kinase, STEAP1, TROP2, TACI, TDO, TGFBETA, T14, TIGIT, TIM3, TLR, TLR2, TLR4, TLR5, TLR9, TMEF1, TNFa, TNFRSF7, Tp55, TREM1, TSLP, TSLPR, TWEAK, VEGF, VISTA, Vstm3, or WUCAM. In some aspects, VL4 and VH4 specifically bind to A2AR, APRIL, ATPDase, BAFF, BAFFR, BCMA, BlyS, BTK, BTLA, B7DC, B7H1, B7H2, B7H3, B7H4, B7H5, B7H6, B7H7, B7RP1, B7-4, C3, C5, CCL2, CCL3, CCL4, CCL5, CCL7, CCL8, CCL11, CCL15, CCL17, CCL19, CCL20, CCL21, CCL25, CCR3, CCR4, CD16A, CD19, CD20, CD24, CD27, CD28, CD30, CD38, CD39, CD40, CD40L, CD47, CD52, CD70, CD80, CD86, CD123, CD133, CD137, CD137L, CD160, CD272, CEACAM5, CLEC9, CLEC91, CRTH2, CSF-1, CSF-2, CSF-3, CXCL1, CXCL2, CXCL4, CXCL12, CXCL13, CXCR3, cMet, CTLA4, DLL3, DLL4, DNGR-1, E-cadherin, EGFR, ENTPD1, EpCAM, FCER1, FCER1A, FCER2, FGFR, FLAP, FOLH1, Gi24, GITR, GITRL, GPR5, GP100, GPRC5D, HER2, HER3, ICOSL, ICOS, HHLA2, HMGB1, HVEM, IDO, IFNa, IgE, IGF1R, IL2Rbeta, IL1, ILIA, IL1B, IL1F10, IL2, IL4, IL4Ra, IL5, IL5R, IL6, IL7, IL7Ra, IL8, IL9, IL9R, IL10, rhILlO, IL12, IL13, IL13Ra1, IL13Ra2, IL15, IL17, IL17Rb, IL18, IL22, IL23, IL25, IL7, IL33, IL35, ITGB4, ITK, KIR, LAG3, LAMP1, leptin, LPFS2, MHC class II, MUC-1, MUC-16, NCR3LG1, NKG2D, NKp46, NTPDase-1, OX40, OX40L, PD-1, PD-L1, PD-L2, PROM1, S152, SIRPalpha, SISP1, SLC, SPG64, ST2, STEAP1, STEAP2, Syk kinase, STEAP1, TROP2, TACI, TDO, TGFBETA, T14, TIGIT, TIM3, TLR, TLR2, TLR4, TLR5, TLR9, TMEF1, TNFa, TNFRSF7, Tp55, TREM1, TSLP, TSLPR, TWEAK, VEGF, VISTA, Vstm3, or WUCAM. The VL1, VL2, VL4, VH1, VH2, and/or VH4 may specifically bind to CD28, cMet, Trop2, CD20, or CD19; and VL3 and/or VH3 may specifically bind to CD3. For example, the antigen binding polypeptide complex may specifically bind CD28, CD3, cMet, and Trop2. For example, the antigen binding polypeptide complex may specifically bind CD28, CD3, CD19, and CD20. For example, VL1 and VH1 may specifically bind to CD28. For example, VL2 and VH2 may specifically bind to CD28. For example, VL4 and VH4 may specifically bind to CD28. For example, VL1 and VH1 may specifically bind to cMet. For example, VL2 and VH2 may specifically bind to cMet. For example, VL4 and VH4 may specifically bind to cMet. For example, VL1 and VH1 may specifically bind to Trop2. For example, VL2 and VH2 may specifically bind to Trop2. For example, VL4 and VH4 may specifically bind to Trop2. For example, VL1 and VH1 may specifically bind to CD19. For example, VL2 and VH2 may specifically bind to CD19. For example, VL4 and VH4 may specifically bind to CD19. For example, VL1 and VH1 may specifically bind to CD20. For example, VL2 and VH2 may specifically bind to CD20. For example, VL4 and VH4 may specifically bind to CD20.

[0192] In some aspects, the invention is directed to an antigen binding polypeptide complex comprising a first polypeptide and a second polypeptide; wherein the first polypeptide has a structure represented by VL1-L1-VL2-L2-VH2-L3-VH1-L4-CH1-L5-Fc; VH1-L6-VH2-L7-VL2-L8-VL1-L9-CH1-L10-Fc; VL1-L11-VL2-L12-VH2-L13-VH1-L14-CL-L15-Fc; VH1-L16-VH2-L17-VL2-L18-VL1-L19-CL-L20-Fc; VL1-L21-VL2-L22-VH2-L23-VH1-L24-CH1-L25-CL-L26-Fc; VH1-L27-VH2-L28-VL2-L29-VL1-L30-CH1-L31-CL-L32-Fc; VL1-L33-VL2-L34-VH2-L35-VH1-L36-CL-L37-CH1-L38-Fc; or VH1-L39-VH2-L40-VL2-L41-VL1-L42-CL-L43-CH1-L44-Fc; wherein the second polypeptide has a structure represented by VL3-L45-VL4-L46-VH4-L47-VH3-L48-CH1-L49-Fc; VH3-L50-VH4-L51-VL4-L52-VL3-L53-CH1-L54-Fc; VL3-L55-VL4-L56-VH4-L57-VH3-L58-CL-L59-Fc; VH3-L60-VH4-L61-VL4-L62-VL3-L63-CL-L64-Fc; VL3-L65-VL4-L66-VH4-L67-VH3-L68-CH1-L69-CL-L70-Fc; VH3-L71-VH4-L72-VL4-L73-VL3-L74-CH1-L75-CL-L76-Fc; VL3-L77-VL4-L78-VH4-L79-VH3-L80-CL-L81-CH1-L82-Fc; or VH3-L83-VH4-L84-VL4-L85-VL3-L86-CL-L87-CH1-L88-Fc; wherein VL1 is a first immunoglobulin light chain variable region that specifically binds to CD28; VL2 is a second immunoglobulin light chain variable region that specifically binds to A2AR, APRIL, ATPDase, BAFF, BAFFR, BCMA, BlyS, BTK, BTLA, B7DC, B7H1, B7H2, B7H3, B7H4, B7H5, B7H6, B7H7, B7RP1, B7-4, C3, C5, CCL2, CCL3, CCL4, CCL5, CCL7, CCL8, CCL11, CCL15, CCL17, CCL19, CCL20, CCL21, CCL25, CCR3, CCR4, CD16A, CD19, CD20, CD24, CD27, CD28, CD30, CD38, CD39, CD40, CD40L, CD47, CD52, CD70, CD80, CD86, CD123, CD133, CD137, CD137L, CD160, CD272, CEACAM5, CLEC9, CLEC91, CRTH2, CSF-1, CSF-2, CSF-3, CXCL1, CXCL2, CXCL4, CXCL12, CXCL13, CXCR3, cMet, CTLA4, DLL3, DLL4, DNGR-1, E-cadherin, EGFR, ENTPD1, EpCAM, FCER1, FCER1A, FCER2, FGFR, FLAP, FOLH1, Gi24, GITR, GITRL, GPR5, GP100, GPRC5D, HER2, HER3, ICOSL, ICOS, HHLA2, HMGB1, HVEM, IDO, IFNa, IgE, IGF1R, IL2Rbeta, IL1, ILIA, IL1B, IL1F10, IL2, IL4, IL4Ra, IL5, IL5R, IL6, IL7, IL7Ra, IL8, IL9, IL9R, IL10, rhILlO, IL12, IL13, IL13Ra1, IL13Ra2, IL15, IL17, IL17Rb, IL18, IL22, IL23, IL25, IL7, IL33, IL35, ITGB4, ITK, KIR, LAG3, LAMP1, leptin, LPFS2, MHC class II, MUC-1, MUC-16, NCR3LG1, NKG2D, NKp46, NTPDase-1, OX40, OX40L, PD-1, PD-L1, PD-L2, PROM1, S152, SIRPalpha, SISP1, SLC, SPG64, ST2, STEAP1, STEAP2, Syk kinase, STEAP1, TROP2, TACI, TDO, TGFBETA, T14, TIGIT, TIM3, TLR, TLR2, TLR4, TLR5, TLR9, TMEF1, TNFa, TNFRSF7, Tp55, TREM1, TSLP, TSLPR, TWEAK, VEGF, VISTA, Vstm3, or WUCAM; VL3 is a third immunoglobulin light chain variable region that specifically binds to CD3; VL4 is a fourth immunoglobulin light chain variable region that specifically binds to A2AR, APRIL, ATPDase, BAFF, BAFFR, BCMA, BlyS, BTK, BTLA, B7DC, B7H1, B7H2, B7H3, B7H4, B7H5, B7H6, B7H7, B7RP1, B7-4, C3, C5, CCL2, CCL3, CCL4, CCL5, CCL7, CCL8, CCL11, CCL15, CCL17, CCL19, CCL20, CCL21, CCL25, CCR3, CCR4, CD16A, CD19, CD20, CD24, CD27, CD28, CD30, CD38, CD39, CD40, CD40L, CD47, CD52, CD70, CD80, CD86, CD123, CD133, CD137, CD137L, CD160, CD272, CEACAM5, CLEC9, CLEC91, CRTH2, CSF-1, CSF-2, CSF-3, CXCL1, CXCL2, CXCL4, CXCL12, CXCL13, CXCR3, cMet, CTLA4, DLL3, DLL4, DNGR-1, E-cadherin, EGFR, ENTPD1, EpCAM, FCER1, FCER1A, FCER2, FGFR, FLAP, FOLH1, Gi24, GITR, GITRL, GPR5, GP100, GPRC5D, HER2, HER3, ICOSL, ICOS, HHLA2, HMGB1, HVEM, IDO, IFNa, IgE, IGF1R, IL2Rbeta, IL1, ILIA, IL1B, IL1F10, IL2, IL4, IL4Ra, IL5, IL5R, IL6, IL7, IL7Ra, IL8, IL9, IL9R, IL10, rhILlO, IL12, IL13, IL13Ra1, IL13Ra2, IL15, IL17, IL17Rb, IL18, IL22, IL23, IL25, IL7, IL33, IL35, ITGB4, ITK, KIR, LAG3, LAMP1, leptin, LPFS2, MHC class II, MUC-1, MUC-16, NCR3LG1, NKG2D, NKp46, NTPDase-1, OX40, OX40L, PD-1, PD-L1, PD-L2, PROM1, S152, SIRPalpha, SISP1, SLC, SPG64, ST2, STEAP1, STEAP2, Syk kinase, STEAP1, TROP2, TACI, TDO, TGFBETA, T14, TIGIT, TIM3, TLR, TLR2, TLR4, TLR5, TLR9, TMEF1, TNFa, TNFRSF7, Tp55, TREM1, TSLP, TSLPR, TWEAK, VEGF, VISTA, Vstm3, or WUCAM; VH1 is a first immunoglobulin heavy chain variable region that specifically binds to CD28; VH2 is a second immunoglobulin heavy chain variable region that specifically binds to A2AR, APRIL, ATPDase, BAFF, BAFFR, BCMA, BlyS, BTK, BTLA, B7DC, B7H1, B7H2, B7H3, B7H4, B7H5, B7H6, B7H7, B7RP1, B7-4, C3, C5, CCL2, CCL3, CCL4, CCL5, CCL7, CCL8, CCL11, CCL15, CCL17, CCL19, CCL20, CCL21, CCL25, CCR3, CCR4, CD16A, CD19, CD20, CD24, CD27, CD28, CD30, CD38, CD39, CD40, CD40L, CD47, CD52, CD70, CD80, CD86, CD123, CD133, CD137, CD137L, CD160, CD272, CEACAM5, CLEC9, CLEC91, CRTH2, CSF-1, CSF-2, CSF-3, CXCL1, CXCL2, CXCL4, CXCL12, CXCL13, CXCR3, cMet, CTLA4, DLL3, DLL4, DNGR-1, E-cadherin, EGFR, ENTPD1, EpCAM, FCER1, FCER1A, FCER2, FGFR, FLAP, FOLH1, Gi24, GITR, GITRL, GPR5, GP100, GPRC5D, HER2, HER3, ICOSL, ICOS, HHLA2, HMGB1, HVEM, IDO, IFNa, IgE, IGF1R, IL2Rbeta, IL1, ILIA, IL1B, IL1F10, IL2, IL4, IL4Ra, IL5, IL5R, IL6, IL7, IL7Ra, IL8, IL9, IL9R, IL10, rhILlO, IL12, IL13, IL13Ra1, IL13Ra2, IL15, IL17, IL17Rb, IL18, IL22, IL23, IL25, IL7, IL33, IL35, ITGB4, ITK, KIR, LAG3, LAMP1, leptin, LPFS2, MHC class II, MUC-1, MUC-16, NCR3LG1, NKG2D, NKp46, NTPDase-1, OX40, OX40L, PD-1, PD-L1, PD-L2, PROM1, S152, SIRPalpha, SISP1, SLC, SPG64, ST2, STEAP1, STEAP2, Syk kinase, STEAP1, TROP2, TACI, TDO, TGFBETA, T14, TIGIT, TIM3, TLR, TLR2, TLR4, TLR5, TLR9, TMEF1, TNFa, TNFRSF7, Tp55, TREM1, TSLP, TSLPR, TWEAK, VEGF, VISTA, Vstm3, or WUCAM; VH3 is a third immunoglobulin heavy chain variable region that specifically binds to CD3; VH4 is a fourth immunoglobulin heavy chain variable region that specifically binds to A2AR, APRIL, ATPDase, BAFF, BAFFR, BCMA, BlyS, BTK, BTLA, B7DC, B7H1, B7H2, B7H3, B7H4, B7H5, B7H6, B7H7, B7RP1, B7-4, C3, C5, CCL2, CCL3, CCL4, CCL5, CCL7, CCL8, CCL11, CCL15, CCL17, CCL19, CCL20, CCL21, CCL25, CCR3, CCR4, CD16A, CD19, CD20, CD24, CD27, CD28, CD30, CD38, CD39, CD40, CD40L, CD47, CD52, CD70, CD80, CD86, CD123, CD133, CD137, CD137L, CD160, CD272, CEACAM5, CLEC9, CLEC91, CRTH2, CSF-1, CSF-2, CSF-3, CXCL1, CXCL2, CXCL4, CXCL12, CXCL13, CXCR3, cMet, CTLA4, DLL3, DLL4, DNGR-1, E-cadherin, EGFR, ENTPD1, EpCAM, FCER1, FCER1A, FCER2, FGFR, FLAP, FOLH1, Gi24, GITR, GITRL, GPR5, GP100, GPRC5D, HER2, HER3, ICOSL, ICOS, HHLA2, HMGB1, HVEM, IDO, IFNa, IgE, IGF1R, IL2Rbeta, IL1, ILIA, IL1B, IL1F10, IL2, IL4, IL4Ra, IL5, IL5R, IL6, IL7, IL7Ra, IL8, IL9, IL9R, IL10, rhILlO, IL12, IL13, IL13Ra1, IL13Ra2, IL15, IL17, IL17Rb, IL18, IL22, IL23, IL25, IL7, IL33, IL35, ITGB4, ITK, KIR, LAG3, LAMP1, leptin, LPFS2, MHC class II, MUC-1, MUC-16, NCR3LG1, NKG2D, NKp46, NTPDase-1, OX40, OX40L, PD-1, PD-L1, PD-L2, PROM1, S152, SIRPalpha, SISP1, SLC, SPG64, ST2, STEAP1, STEAP2, Syk kinase, STEAP1, TROP2, TACI, TDO, TGFBETA, T14, TIGIT, TIM3, TLR, TLR2, TLR4, TLR5, TLR9, TMEF1, TNFa, TNFRSF7, Tp55, TREM1, TSLP, TSLPR, TWEAK, VEGF, VISTA, Vstm3, or WUCAM; Fc is a region comprising an immunoglobulin heavy chain constant region 2 (CH2), an immunoglobulin heavy chain constant region 3 (CH3), and optionally, an immunoglobulin hinge; CH1 is an immunoglobulin heavy chain constant region 1; CL is an immunoglobulin light chain constant region; and L1-L88 are amino acid linkers. In some aspects, the first polypeptide has a structure represented by VL1-L1-VL2-L2-VH2-L3-VH1-L4-CH1-L5-Fc; VH1-L6-VH2-L7-VL2-L8-VL1-L9-CH1-L10-Fc; VL1-L11-VL2-L12-VH2-L13-VH1-L14-CL-L15-Fc; VH1-L16-VH2-L17-VL2-L18-VL1-L19-CL-L20-Fc; VL1-L21-VL2-L22-VH2-L23-VH1-L24-CH1-L25-CL-L26-Fc; VH1-L27-VH2-L28-VL2-L29-VL1-L30-CH1-L31-CL-L32-Fc; VL1-L33-VL2-L34-VH2-L35-VH1-L36-CL-L37-CH1-L38-Fc; or VH1-L39-VH2-L40-VL2-L41-VL1-L42-CL-L43-CH1-L44-Fc and the second polypeptide has a structure represented by VL3-L45-VL4-L46-VH4-L47-VH3-L48-CH1-L49-Fc. In some aspects, the first polypeptide has a structure represented by VL1-L1-VL2-L2-VH2-L3-VH1-L4-CH1-L5-Fc; VH1-L6-VH2-L7-VL2-L8-VL1-L9-CH1-L10-Fc; VL1-L11-VL2-L12-VH2-L13-VH1-L14-CL-L15-Fc; VH1-L16-VH2-L17-VL2-L18-VL1-L19-CL-L20-Fc; VL1-L21-VL2-L22-VH2-L23-VH1-L24-CH1-L25-CL-L26-Fc; VH1-L27-VH2-L28-VL2-L29-VL1-L30-CH1-L31-CL-L32-Fc; VL1-L33-VL2-L34-VH2-L35-VH1-L36-CL-L37-CH1-L38-Fc; or VH1-L39-VH2-L40-VL2-L41-VL1-L42-CL-L43-CH1-L44-Fc and the second polypeptide has a structure represented by VH3-L50-VH4-L51-VL4-L52-VL3-L53-CH1-L54-Fc. In some aspects, the first polypeptide has a structure represented by VL1-L1-VL2-L2-VH2-L3-VH1-L4-CH1-L5-Fc; VH1-L6-VH2-L7-VL2-L8-VL1-L9-CH1-L10-Fc; VL1-L11-VL2-L12-VH2-L13-VH1-L14-CL-L15-Fc; VH1-L16-VH2-L17-VL2-L18-VL1-L19-CL-L20-Fc; VL1-L21-VL2-L22-VH2-L23-VH1-L24-CH1-L25-CL-L26-Fc; VH1-L27-VH2-L28-VL2-L29-VL1-L30-CH1-L31-CL-L32-Fc; VL1-L33-VL2-L34-VH2-L35-VH1-L36-CL-L37-CH1-L38-Fc; or VH1-L39-VH2-L40-VL2-L41-VL1-L42-CL-L43-CH1-L44-Fc and the second polypeptide has a structure represented by VL3-L55-VL4-L56-VH4-L57-VH3-L58-CL-L59-Fc. In some aspects, the first polypeptide has a structure represented by VL1-L1-VL2-L2-VH2-L3-VH1-L4-CH1-L5-Fc; VH1-L6-VH2-L7-VL2-L8-VL1-L9-CH1-L10-Fc; VL1-L11-VL2-L12-VH2-L13-VH1-L14-CL-L15-Fc; VH1-L16-VH2-L17-VL2-L18-VL1-L19-CL-L20-Fc; VL1-L21-VL2-L22-VH2-L23-VH1-L24-CH1-L25-CL-L26-Fc; VH1-L27-VH2-L28-VL2-L29-VL1-L30-CH1-L31-CL-L32-Fc; VL1-L33-VL2-L34-VH2-L35-VH1-L36-CL-L37-CH1-L38-Fc; or VH1-L39-VH2-L40-VL2-L41-VL1-L42-CL-L43-CH1-L44-Fc and the second polypeptide has a structure represented by VH3-L60-VH4-L61-VL4-L62-VL3-L63-CL-L64-Fc. In some aspects, the first polypeptide has a structure represented by VL1-L1-VL2-L2-VH2-L3-VH1-L4-CH1-L5-Fc; VH1-L6-VH2-L7-VL2-L8-VL1-L9-CH1-L10-Fc; VL1-L11-VL2-L12-VH2-L13-VH1-L14-CL-L15-Fc; VH1-L16-VH2-L17-VL2-L18-VL1-L19-CL-L20-Fc; VL1-L21-VL2-L22-VH2-L23-VH1-L24-CH1-L25-CL-L26-Fc; VH1-L27-VH2-L28-VL2-L29-VL1-L30-CH1-L31-CL-L32-Fc; VL1-L33-VL2-L34-VH2-L35-VH1-L36-CL-L37-CH1-L38-Fc; or VH1-L39-VH2-L40-VL2-L41-VL1-L42-CL-L43-CH1-L44-Fc and the second polypeptide has a structure represented by VL3-L65-VL4-L66-VH4-L67-VH3-L68-CH1-L69-CL-L70-Fc. In some aspects, the first polypeptide has a structure represented by VL1-L1-VL2-L2-VH2-L3-VH1-L4-CH1-L5-Fc; VH1-L6-VH2-L7-VL2-L8-VL1-L9-CH1-L10-Fc; VL1-L11-VL2-L12-VH2-L13-VH1-L14-CL-L15-Fc; VH1-L16-VH2-L17-VL2-L18-VL1-L19-CL-L20-Fc; VL1-L21-VL2-L22-VH2-L23-VH1-L24-CH1-L25-CL-L26-Fc; VH1-L27-VH2-L28-VL2-L29-VL1-L30-CH1-L31-CL-L32-Fc; VL1-L33-VL2-L34-VH2-L35-VH1-L36-CL-L37-CH1-L38-Fc; or VH1-L39-VH2-L40-VL2-L41-VL1-L42-CL-L43-CH1-L44-Fc and the second polypeptide has a structure represented by VH3-L71-VH4-L72-VL4-L73-VL3-L74-CH1-L75-CL-L76-Fc. In some aspects, the first polypeptide has a structure represented by VL1-L1-VL2-L2-VH2-L3-VH1-L4-CH1-L5-Fc; VH1-L6-VH2-L7-VL2-L8-VL1-L9-CH1-L10-Fc; VL1-L11-VL2-L12-VH2-L13-VH1-L14-CL-L15-Fc; VH1-L16-VH2-L17-VL2-L18-VL1-L19-CL-L20-Fc; VL1-L21-VL2-L22-VH2-L23-VH1-L24-CH1-L25-CL-L26-Fc; VH1-L27-VH2-L28-VL2-L29-VL1-L30-CH1-L31-CL-L32-Fc; VL1-L33-VL2-L34-VH2-L35-VH1-L36-CL-L37-CH1-L38-Fc; or VH1-L39-VH2-L40-VL2-L41-VL1-L42-CL-L43-CH1-L44-Fc and the second polypeptide has a structure represented by VL3-L77-VL4-L78-VH4-L79-VH3-L80-CL-L81-CH1-L82-Fc. In some aspects, the first polypeptide has a structure represented by VL1-L1-VL2-L2-VH2-L3-VH1-L4-CH1-L5-Fc; VH1-L6-VH2-L7-VL2-L8-VL1-L9-CH1-L10-Fc; VL1-L11-VL2-L12-VH2-L13-VH1-L14-CL-L15-Fc; VH1-L16-VH2-L17-VL2-L18-VL1-L19-CL-L20-Fc; VL1-L21-VL2-L22-VH2-L23-VH1-L24-CH1-L25-CL-L26-Fc; VH1-L27-VH2-L28-VL2-L29-VL1-L30-CH1-L31-CL-L32-Fc; VL1-L33-VL2-L34-VH2-L35-VH1-L36-CL-L37-CH1-L38-Fc; or VH1-L39-VH2-L40-VL2-L41-VL1-L42-CL-L43-CH1-L44-Fc and the second polypeptide has a structure represented by VH3-L83-VH4-L84-VL4-L85-VL3-L86-CL-L87-CH1-L88-Fc. In some aspects, VL2 and VH2 specifically bind to A2AR, APRIL, ATPDase, BAFF, BAFFR, BCMA, BlyS, BTK, BTLA, B7DC, B7H1, B7H2, B7H3, B7H4, B7H5, B7H6, B7H7, B7RP1, B7-4, C3, C5, CCL2, CCL3, CCL4, CCL5, CCL7, CCL8, CCL11, CCL15, CCL17, CCL19, CCL20, CCL21, CCL25, CCR3, CCR4, CD16A, CD19, CD20, CD24, CD27, CD28, CD30, CD38, CD39, CD40, CD40L, CD47, CD52, CD70, CD80, CD86, CD123, CD133, CD137, CD137L, CD160, CD272, CEACAM5, CLEC9, CLEC91, CRTH2, CSF-1, CSF-2, CSF-3, CXCL1, CXCL2, CXCL4, CXCL12, CXCL13, CXCR3, cMet, CTLA4, DLL3, DLL4, DNGR-1, E-cadherin, EGFR, ENTPD1, EpCAM, FCER1, FCER1A, FCER2, FGFR, FLAP, FOLH1, Gi24, GITR, GITRL, GPR5, GP100, GPRC5D, HER2, HER3, ICOSL, ICOS, HHLA2, HMGB1, HVEM, IDO, IFNa, IgE, IGF1R, IL2Rbeta, IL1, ILIA, IL1B, IL1F10, IL2, IL4, IL4Ra, IL5, IL5R, IL6, IL7, IL7Ra, IL8, IL9, IL9R, IL10, rhILlO, IL12, IL13, IL13Ra1, IL13Ra2, IL15, IL17, IL17Rb, IL18, IL22, IL23, IL25, IL7, IL33, IL35, ITGB4, ITK, KIR, LAG3, LAMP1, leptin, LPFS2, MHC class II, MUC-1, MUC-16, NCR3LG1, NKG2D, NKp46, NTPDase-1, OX40, OX40L, PD-1, PD-L1, PD-L2, PROM1, S152, SIRPalpha, SISP1, SLC, SPG64, ST2, STEAP1, STEAP2, Syk kinase, STEAP1, TROP2, TACI, TDO, TGFBETA, T14, TIGIT, TIM3, TLR, TLR2, TLR4, TLR5, TLR9, TMEF1, TNFa, TNFRSF7, Tp55, TREM1, TSLP, TSLPR, TWEAK, VEGF, VISTA, Vstm3, or WUCAM. In some aspects, VL4 and VH4 specifically bind to A2AR, APRIL, ATPDase, BAFF, BAFFR, BCMA, BlyS, BTK, BTLA, B7DC, B7H1, B7H2, B7H3, B7H4, B7H5, B7H6, B7H7, B7RP1, B7-4, C3, C5, CCL2, CCL3, CCL4, CCL5, CCL7, CCL8, CCL11, CCL15, CCL17, CCL19, CCL20, CCL21, CCL25, CCR3, CCR4, CD16A, CD19, CD20, CD24, CD27, CD28, CD30, CD38, CD39, CD40, CD40L, CD47, CD52, CD70, CD80, CD86, CD123, CD133, CD137, CD137L, CD160, CD272, CEACAM5, CLEC9, CLEC91, CRTH2, CSF-1, CSF-2, CSF-3, CXCL1, CXCL2, CXCL4, CXCL12, CXCL13, CXCR3, cMet, CTLA4, DLL3, DLL4, DNGR-1, E-cadherin, EGFR, ENTPD1, EpCAM, FCER1, FCER1A, FCER2, FGFR, FLAP, FOLH1, Gi24, GITR, GITRL, GPR5, GP100, GPRC5D, HER2, HER3, ICOSL, ICOS, HHLA2, HMGB1, HVEM, IDO, IFNa, IgE, IGF1R, IL2Rbeta, IL1, ILIA, IL1B, IL1F10, IL2, IL4, IL4Ra, IL5, IL5R, IL6, IL7, IL7Ra, IL8, IL9, IL9R, IL10, rhILlO, IL12, IL13, IL13Ra1, IL13Ra2, IL15, IL17, IL17Rb, IL18, IL22, IL23, IL25, IL7, IL33, IL35, ITGB4, ITK, KIR, LAG3, LAMP1, leptin, LPFS2, MHC class II, MUC-1, MUC-16, NCR3LG1, NKG2D, NKp46, NTPDase-1, OX40, OX40L, PD-1, PD-L1, PD-L2, PROM1, S152, SIRPalpha, SISP1, SLC, SPG64, ST2, STEAP1, STEAP2, Syk kinase, STEAP1, TROP2, TACI, TDO, TGFBETA, T14, TIGIT, TIM3, TLR, TLR2, TLR4, TLR5, TLR9, TMEF1, TNFa, TNFRSF7, Tp55, TREM1, TSLP, TSLPR, TWEAK, VEGF, VISTA, Vstm3, or WUCAM. The VL1 and/or VH1 may specifically bind to CD28; VL2, VL4, VH2, and/or VH4 may specifically bind to cMet, Trop2, CD20, or CD19; and VL3 and/or VH3 may specifically bind to CD3. For example, the antigen binding polypeptide complex may specifically bind CD28, CD3, cMet, and Trop2. For example, the antigen binding polypeptide complex may specifically bind CD28, CD3, CD19, and CD20. For example, VL2 and VH2 may specifically bind to cMet. For example, VL4 and VH4 may specifically bind to cMet. For example, VL2 and VH2 may specifically bind to Trop2. For example, VL4 and VH4 may specifically bind to Trop2. For example, VL2 and VH2 may specifically bind to CD19. For example, VL4 and VH4 may specifically bind to CD19. For example, VL2 and VH2 may specifically bind to CD20. For example, VL4 and VH4 may specifically bind to CD20.

[0193] In some aspects, the invention is directed to an antigen binding polypeptide complex comprising a first polypeptide and a second polypeptide; wherein the first polypeptide has a structure represented by VL1-L1-VL2-L2-VH2-L3-VH1-L4-CH1-L5-Fc; VH1-L6-VH2-L7-VL2-L8-VL1-L9-CH1-L10-Fc; VL1-L11-VL2-L12-VH2-L13-VH1-L14-CL-L15-Fc; VH1-L16-VH2-L17-VL2-L18-VL1-L19-CL-L20-Fc; VL1-L21-VL2-L22-VH2-L23-VH1-L24-CH1-L25-CL-L26-Fc; VH1-L27-VH2-L28-VL2-L29-VL1-L30-CH1-L31-CL-L32-Fc; VL1-L33-VL2-L34-VH2-L35-VH1-L36-CL-L37-CH1-L38-Fc; or VH1-L39-VH2-L40-VL2-L41-VL1-L42-CL-L43-CH1-L44-Fc; wherein the second polypeptide has a structure represented by VL3-L45-VL4-L46-VH4-L47-VH3-L48-CH1-L49-Fc; VH3-L50-VH4-L51-VL4-L52-VL3-L53-CH1-L54-Fc; VL3-L55-VL4-L56-VH4-L57-VH3-L58-CL-L59-Fc; VH3-L60-VH4-L61-VL4-L62-VL3-L63-CL-L64-Fc; VL3-L65-VL4-L66-VH4-L67-VH3-L68-CH1-L69-CL-L70-Fc; VH3-L71-VH4-L72-VL4-L73-VL3-L74-CH1-L75-CL-L76-Fc; VL3-L77-VL4-L78-VH4-L79-VH3-L80-CL-L81-CH1-L82-Fc; or VH3-L83-VH4-L84-VL4-L85-VL3-L86-CL-L87-CH1-L88-Fc; wherein VL1 is a first immunoglobulin light chain variable region that specifically binds to A2AR, APRIL, ATPDase, BAFF, BAFFR, BCMA, BlyS, BTK, BTLA, B7DC, B7H1, B7H2, B7H3, B7H4, B7H5, B7H6, B7H7, B7RP1, B7-4, C3, C5, CCL2, CCL3, CCL4, CCL5, CCL7, CCL8, CCL11, CCL15, CCL17, CCL19, CCL20, CCL21, CCL25, CCR3, CCR4, CD16A, CD19, CD20, CD24, CD27, CD28, CD30, CD38, CD39, CD40, CD40L, CD47, CD52, CD70, CD80, CD86, CD123, CD133, CD137, CD137L, CD160, CD272, CEACAM5, CLEC9, CLEC91, CRTH2, CSF-1, CSF-2, CSF-3, CXCL1, CXCL2, CXCL4, CXCL12, CXCL13, CXCR3, cMet, CTLA4, DLL3, DLL4, DNGR-1, E-cadherin, EGFR, ENTPD1, EpCAM, FCER1, FCER1A, FCER2, FGFR, FLAP, FOLH1, Gi24, GITR, GITRL, GPR5, GP100, GPRC5D, HER2, HER3, ICOSL, ICOS, HHLA2, HMGB1, HVEM, IDO, IFNa, IgE, IGF1R, IL2Rbeta, IL1, ILIA, IL1B, IL1F10, IL2, IL4, IL4Ra, IL5, IL5R, IL6, IL7, IL7Ra, IL8, IL9, IL9R, IL10, rhILlO, IL12, IL13, IL13Ra1, IL13Ra2, IL15, IL17, IL17Rb, IL18, IL22, IL23, IL25, IL7, IL33, IL35, ITGB4, ITK, KIR, LAG3, LAMP1, leptin, LPFS2, MHC class II, MUC-1, MUC-16, NCR3LG1, NKG2D, NKp46, NTPDase-1, OX40, OX40L, PD-1, PD-L1, PD-L2, PROM1, S152, SIRPalpha, SISP1, SLC, SPG64, ST2, STEAP1, STEAP2, Syk kinase, STEAP1, TROP2, TACI, TDO, TGFBETA, T14, TIGIT, TIM3, TLR, TLR2, TLR4, TLR5, TLR9, TMEF1, TNFa, TNFRSF7, Tp55, TREM1, TSLP, TSLPR, TWEAK, VEGF, VISTA, Vstm3, or WUCAM; VL2 is a second immunoglobulin light chain variable region that specifically binds to CD28; VL3 is a third immunoglobulin light chain variable region that specifically binds to CD3; VL4 is a fourth immunoglobulin light chain variable region that specifically binds to A2AR, APRIL, ATPDase, BAFF, BAFFR, BCMA, BlyS, BTK, BTLA, B7DC, B7H1, B7H2, B7H3, B7H4, B7H5, B7H6, B7H7, B7RP1, B7-4, C3, C5, CCL2, CCL3, CCL4, CCL5, CCL7, CCL8, CCL11, CCL15, CCL17, CCL19, CCL20, CCL21, CCL25, CCR3, CCR4, CD16A, CD19, CD20, CD24, CD27, CD28, CD30, CD38, CD39, CD40, CD40L, CD47, CD52, CD70, CD80, CD86, CD123, CD133, CD137, CD137L, CD160, CD272, CEACAM5, CLEC9, CLEC91, CRTH2, CSF-1, CSF-2, CSF-3, CXCL1, CXCL2, CXCL4, CXCL12, CXCL13, CXCR3, cMet, CTLA4, DLL3, DLL4, DNGR-1, E-cadherin, EGFR, ENTPD1, EpCAM, FCER1, FCER1A, FCER2, FGFR, FLAP, FOLH1, Gi24, GITR, GITRL, GPR5, GP100, GPRC5D, HER2, HER3, ICOSL, ICOS, HHLA2, HMGB1, HVEM, IDO, IFNa, IgE, IGF1R, IL2Rbeta, IL1, ILIA, IL1B, IL1F10, IL2, IL4, IL4Ra, IL5, IL5R, IL6, IL7, IL7Ra, IL8, IL9, IL9R, IL10, rhILlO, IL12, IL13, IL13Ra1, IL13Ra2, IL15, IL17, IL17Rb, IL18, IL22, IL23, IL25, IL7, IL33, IL35, ITGB4, ITK, KIR, LAG3, LAMP1, leptin, LPFS2, MHC class II, MUC-1, MUC-16, NCR3LG1, NKG2D, NKp46, NTPDase-1, OX40, OX40L, PD-1, PD-L1, PD-L2, PROM1, S152, SIRPalpha, SISP1, SLC, SPG64, ST2, STEAP1, STEAP2, Syk kinase, STEAP1, TROP2, TACI, TDO, TGFBETA, T14, TIGIT, TIM3, TLR, TLR2, TLR4, TLR5, TLR9, TMEF1, TNFa, TNFRSF7, Tp55, TREM1, TSLP, TSLPR, TWEAK, VEGF, VISTA, Vstm3, or WUCAM; VH1 is a first immunoglobulin heavy chain variable region that specifically binds to A2AR, APRIL, ATPDase, BAFF, BAFFR, BCMA, BlyS, BTK, BTLA, B7DC, B7H1, B7H2, B7H3, B7H4, B7H5, B7H6, B7H7, B7RP1, B7-4, C3, C5, CCL2, CCL3, CCL4, CCL5, CCL7, CCL8, CCL11, CCL15, CCL17, CCL19, CCL20, CCL21, CCL25, CCR3, CCR4, CD16A, CD19, CD20, CD24, CD27, CD28, CD30, CD38, CD39, CD40, CD40L, CD47, CD52, CD70, CD80, CD86, CD123, CD133, CD137, CD137L, CD160, CD272, CEACAM5, CLEC9, CLEC91, CRTH2, CSF-1, CSF-2, CSF-3, CXCL1, CXCL2, CXCL4, CXCL12, CXCL13, CXCR3, cMet, CTLA4, DLL3, DLL4, DNGR-1, E-cadherin, EGFR, ENTPD1, EpCAM, FCER1, FCER1A, FCER2, FGFR, FLAP, FOLH1, Gi24, GITR, GITRL, GPR5, GP100, GPRC5D, HER2, HER3, ICOSL, ICOS, HHLA2, HMGB1, HVEM, IDO, IFNa, IgE, IGF1R, IL2Rbeta, IL1, ILIA, IL1B, IL1F10, IL2, IL4, IL4Ra, IL5, IL5R, IL6, IL7, IL7Ra, IL8, IL9, IL9R, IL10, rhILlO, IL12, IL13, IL13Ra1, IL13Ra2, IL15, IL17, IL17Rb, IL18, IL22, IL23, IL25, IL7, IL33, IL35, ITGB4, ITK, KIR, LAG3, LAMP1, leptin, LPFS2, MHC class II, MUC-1, MUC-16, NCR3LG1, NKG2D, NKp46, NTPDase-1, OX40, OX40L, PD-1, PD-L1, PD-L2, PROM1, 5152, SIRPalpha, SISP1, SLC, SPG64, ST2, STEAP1, STEAP2, Syk kinase, STEAP1, TROP2, TACI, TDO, TGFBETA, T14, TIGIT, TIM3, TLR, TLR2, TLR4, TLR5, TLR9, TMEF1, TNFa, TNFRSF7, Tp55, TREM1, TSLP, TSLPR, TWEAK, VEGF, VISTA, Vstm3, or WUCAM; VH2 is a second immunoglobulin heavy chain variable region that specifically binds to CD28; VH3 is a third immunoglobulin heavy chain variable region that specifically binds to CD3; VH4 is a fourth immunoglobulin heavy chain variable region that specifically binds to A2AR, APRIL, ATPDase, BAFF, BAFFR, BCMA, BlyS, BTK, BTLA, B7DC, B7H1, B7H2, B7H3, B7H4, B7H5, B7H6, B7H7, B7RP1, B7-4, C3, C5, CCL2, CCL3, CCL4, CCL5, CCL7, CCL8, CCL11, CCL15, CCL17, CCL19, CCL20, CCL21, CCL25, CCR3, CCR4, CD16A, CD19, CD20, CD24, CD27, CD28, CD30, CD38, CD39, CD40, CD40L, CD47, CD52, CD70, CD80, CD86, CD123, CD133, CD137, CD137L, CD160, CD272, CEACAM5, CLEC9, CLEC91, CRTH2, CSF-1, CSF-2, CSF-3, CXCL1, CXCL2, CXCL4, CXCL12, CXCL13, CXCR3, cMet, CTLA4, DLL3, DLL4, DNGR-1, E-cadherin, EGFR, ENTPD1, EpCAM, FCER1, FCER1A, FCER2, FGFR, FLAP, FOLH1, Gi24, GITR, GITRL, GPR5, GP100, GPRC5D, HER2, HER3, ICOSL, ICOS, HHLA2, HMGB1, HVEM, IDO, IFNa, IgE, IGF1R, IL2Rbeta, IL1, ILIA, IL1B, IL1F10, IL2, IL4, IL4Ra, IL5, IL5R, IL6, IL7, IL7Ra, IL8, IL9, IL9R, IL10, rhILlO, IL12, IL13, IL13Ra1, IL13Ra2, IL15, IL17, IL17Rb, IL18, IL22, IL23, IL25, IL7, IL33, IL35, ITGB4, ITK, KIR, LAG3, LAMP1, leptin, LPFS2, MHC class II, MUC-1, MUC-16, NCR3LG1, NKG2D, NKp46, NTPDase-1, OX40, OX40L, PD-1, PD-L1, PD-L2, PROM1, S152, SIRPalpha, SISP1, SLC, SPG64, ST2, STEAP1, STEAP2, Syk kinase, STEAP1, TROP2, TACI, TDO, TGFBETA, T14, TIGIT, TIM3, TLR, TLR2, TLR4, TLR5, TLR9, TMEF1, TNFa, TNFRSF7, Tp55, TREM1, TSLP, TSLPR, TWEAK, VEGF, VISTA, Vstm3, or WUCAM; Fc is a region comprising an immunoglobulin heavy chain constant region 2 (CH2), an immunoglobulin heavy chain constant region 3 (CH3), and optionally, an immunoglobulin hinge; CH1 is an immunoglobulin heavy chain constant region 1; CL is an immunoglobulin light chain constant region; and L1-L88 are amino acid linkers. In some aspects, the first polypeptide has a structure represented by VL1-L1-VL2-L2-VH2-L3-VH1-L4-CH1-L5-Fc; VH1-L6-VH2-L7-VL2-L8-VL1-L9-CH1-L10-Fc; VL1-L11-VL2-L12-VH2-L13-VH1-L14-CL-L15-Fc; VH1-L16-VH2-L17-VL2-L18-VL1-L19-CL-L20-Fc; VL1-L21-VL2-L22-VH2-L23-VH1-L24-CH1-L25-CL-L26-Fc; VH1-L27-VH2-L28-VL2-L29-VL1-L30-CH1-L31-CL-L32-Fc; VL1-L33-VL2-L34-VH2-L35-VH1-L36-CL-L37-CH1-L38-Fc; or VH1-L39-VH2-L40-VL2-L41-VL1-L42-CL-L43-CH1-L44-Fc and the second polypeptide has a structure represented by VL3-L45-VL4-L46-VH4-L47-VH3-L48-CH1-L49-Fc. In some aspects, the first polypeptide has a structure represented by VL1-L1-VL2-L2-VH2-L3-VH1-L4-CH1-L5-Fc; VH1-L6-VH2-L7-VL2-L8-VL1-L9-CH1-L10-Fc; VL1-L11-VL2-L12-VH2-L13-VH1-L14-CL-L15-Fc; VH1-L16-VH2-L17-VL2-L18-VL1-L19-CL-L20-Fc; VL1-L21-VL2-L22-VH2-L23-VH1-L24-CH1-L25-CL-L26-Fc; VH1-L27-VH2-L28-VL2-L29-VL1-L30-CH1-L31-CL-L32-Fc; VL1-L33-VL2-L34-VH2-L35-VH1-L36-CL-L37-CH1-L38-Fc; or VH1-L39-VH2-L40-VL2-L41-VL1-L42-CL-L43-CH1-L44-Fc and the second polypeptide has a structure represented by VH3-L50-VH4-L51-VL4-L52-VL3-L53-CH1-L54-Fc. In some aspects, the first polypeptide has a structure represented by VL1-L1-VL2-L2-VH2-L3-VH1-L4-CH1-L5-Fc; VH1-L6-VH2-L7-VL2-L8-VL1-L9-CH1-L10-Fc; VL1-L11-VL2-L12-VH2-L13-VH1-L14-CL-L15-Fc; VH1-L16-VH2-L17-VL2-L18-VL1-L19-CL-L20-Fc; VL1-L21-VL2-L22-VH2-L23-VH1-L24-CH1-L25-CL-L26-Fc; VH1-L27-VH2-L28-VL2-L29-VL1-L30-CH1-L31-CL-L32-Fc; VL1-L33-VL2-L34-VH2-L35-VH1-L36-CL-L37-CH1-L38-Fc; or VH1-L39-VH2-L40-VL2-L41-VL1-L42-CL-L43-CH1-L44-Fc and the second polypeptide has a structure represented by VL3-L55-VL4-L56-VH4-L57-VH3-L58-CL-L59-Fc. In some aspects, the first polypeptide has a structure represented by VL1-L1-VL2-L2-VH2-L3-VH1-L4-CH1-L5-Fc; VH1-L6-VH2-L7-VL2-L8-VL1-L9-CH1-L10-Fc; VL1-L11-VL2-L12-VH2-L13-VH1-L14-CL-L15-Fc; VH1-L16-VH2-L17-VL2-L18-VL1-L19-CL-L20-Fc; VL1-L21-VL2-L22-VH2-L23-VH1-L24-CH1-L25-CL-L26-Fc; VH1-L27-VH2-L28-VL2-L29-VL1-L30-CH1-L31-CL-L32-Fc; VL1-L33-VL2-L34-VH2-L35-VH1-L36-CL-L37-CH1-L38-Fc; or VH1-L39-VH2-L40-VL2-L41-VL1-L42-CL-L43-CH1-L44-Fc and the second polypeptide has a structure represented by VH3-L60-VH4-L61-VL4-L62-VL3-L63-CL-L64-Fc. In some aspects, the first polypeptide has a structure represented by VL1-L1-VL2-L2-VH2-L3-VH1-L4-CH1-L5-Fc; VH1-L6-VH2-L7-VL2-L8-VL1-L9-CH1-L10-Fc; VL1-L11-VL2-L12-VH2-L13-VH1-L14-CL-L15-Fc; VH1-L16-VH2-L17-VL2-L18-VL1-L19-CL-L20-Fc; VL1-L21-VL2-L22-VH2-L23-VH1-L24-CH1-L25-CL-L26-Fc; VH1-L27-VH2-L28-VL2-L29-VL1-L30-CH1-L31-CL-L32-Fc; VL1-L33-VL2-L34-VH2-L35-VH1-L36-CL-L37-CH1-L38-Fc; or VH1-L39-VH2-L40-VL2-L41-VL1-L42-CL-L43-CH1-L44-Fc and the second polypeptide has a structure represented by VL3-L65-VL4-L66-VH4-L67-VH3-L68-CH1-L69-CL-L70-Fc. In some aspects, the first polypeptide has a structure represented by VL1-L1-VL2-L2-VH2-L3-VH1-L4-CH1-L5-Fc; VH1-L6-VH2-L7-VL2-L8-VL1-L9-CH1-L10-Fc; VL1-L11-VL2-L12-VH2-L13-VH1-L14-CL-L15-Fc; VH1-L16-VH2-L17-VL2-L18-VL1-L19-CL-L20-Fc; VL1-L21-VL2-L22-VH2-L23-VH1-L24-CH1-L25-CL-L26-Fc; VH1-L27-VH2-L28-VL2-L29-VL1-L30-CH1-L31-CL-L32-Fc; VL1-L33-VL2-L34-VH2-L35-VH1-L36-CL-L37-CH1-L38-Fc; or VH1-L39-VH2-L40-VL2-L41-VL1-L42-CL-L43-CH1-L44-Fc and the second polypeptide has a structure represented by VH3-L71-VH4-L72-VL4-L73-VL3-L74-CH1-L75-CL-L76-Fc. In some aspects, the first polypeptide has a structure represented by VL1-L1-VL2-L2-VH2-L3-VH1-L4-CH1-L5-Fc; VH1-L6-VH2-L7-VL2-L8-VL1-L9-CH1-L10-Fc; VL1-L11-VL2-L12-VH2-L13-VH1-L14-CL-L15-Fc; VH1-L16-VH2-L17-VL2-L18-VL1-L19-CL-L20-Fc; VL1-L21-VL2-L22-VH2-L23-VH1-L24-CH1-L25-CL-L26-Fc; VH1-L27-VH2-L28-VL2-L29-VL1-L30-CH1-L31-CL-L32-Fc; VL1-L33-VL2-L34-VH2-L35-VH1-L36-CL-L37-CH1-L38-Fc; or VH1-L39-VH2-L40-VL2-L41-VL1-L42-CL-L43-CH1-L44-Fc and the second polypeptide has a structure represented by VL3-L77-VL4-L78-VH4-L79-VH3-L80-CL-L81-CH1-L82-Fc. In some aspects, the first polypeptide has a structure represented by VL1-L1-VL2-L2-VH2-L3-VH1-L4-CH1-L5-Fc; VH1-L6-VH2-L7-VL2-L8-VL1-L9-CH1-L10-Fc; VL1-L11-VL2-L12-VH2-L13-VH1-L14-CL-L15-Fc; VH1-L16-VH2-L17-VL2-L18-VL1-L19-CL-L20-Fc; VL1-L21-VL2-L22-VH2-L23-VH1-L24-CH1-L25-CL-L26-Fc; VH1-L27-VH2-L28-VL2-L29-VL1-L30-CH1-L31-CL-L32-Fc; VL1-L33-VL2-L34-VH2-L35-VH1-L36-CL-L37-CH1-L38-Fc; or VH1-L39-VH2-L40-VL2-L41-VL1-L42-CL-L43-CH1-L44-Fc and the second polypeptide has a structure represented by VH3-L83-VH4-L84-VL4-L85-VL3-L86-CL-L87-CH1-L88-Fc. In some aspects, VL1 and VH1 may specifically bind to A2AR, APRIL, ATPDase, BAFF, BAFFR, BCMA, BlyS, BTK, BTLA, B7DC, B7H1, B7H2, B7H3, B7H4, B7H5, B7H6, B7H7, B7RP1, B7-4, C3, C5, CCL2, CCL3, CCL4, CCL5, CCL7, CCL8, CCL11, CCL15, CCL17, CCL19, CCL20, CCL21, CCL25, CCR3, CCR4, CD16A, CD19, CD20, CD24, CD27, CD28, CD30, CD38, CD39, CD40, CD40L, CD47, CD52, CD70, CD80, CD86, CD123, CD133, CD137, CD137L, CD160, CD272, CEACAM5, CLEC9, CLEC91, CRTH2, CSF-1, CSF-2, CSF-3, CXCL1, CXCL2, CXCL4, CXCL12, CXCL13, CXCR3, cMet, CTLA4, DLL3, DLL4, DNGR-1, E-cadherin, EGFR, ENTPD1, EpCAM, FCER1, FCER1A, FCER2, FGFR, FLAP, FOLH1, Gi24, GITR, GITRL, GPR5, GP100, GPRC5D, HER2, HER3, ICOSL, ICOS, HHLA2, HMGB1, HVEM, IDO, IFNa, IgE, IGF1R, IL2Rbeta, IL1, ILIA, IL1B, IL1F10, IL2, IL4, IL4Ra, IL5, IL5R, IL6, IL7, IL7Ra, IL8, IL9, IL9R, IL10, rhILlO, IL12, IL13, IL13Ra1, IL13Ra2, IL15, IL17, IL17Rb, IL18, IL22, IL23, IL25, IL7, IL33, IL35, ITGB4, ITK, KIR, LAG3, LAMP1, leptin, LPFS2, MHC class II, MUC-1, MUC-16, NCR3LG1, NKG2D, NKp46, NTPDase-1, OX40, OX40L, PD-1, PD-L1, PD-L2, PROM1, S152, SIRPalpha, SISP1, SLC, SPG64, ST2, STEAP1, STEAP2, Syk kinase, STEAP1, TROP2, TACI, TDO, TGFBETA, T14, TIGIT, TIM3, TLR, TLR2, TLR4, TLR5, TLR9, TMEF1, TNFa, TNFRSF7, Tp55, TREM1, TSLP, TSLPR, TWEAK, VEGF, VISTA, Vstm3, or WUCAM. In some aspects, VL4 and VH4 maythat specifically bind to A2AR, APRIL, ATPDase, BAFF, BAFFR, BCMA, BlyS, BTK, BTLA, B7DC, B7H1, B7H2, B7H3, B7H4, B7H5, B7H6, B7H7, B7RP1, B7-4, C3, C5, CCL2, CCL3, CCL4, CCL5, CCL7, CCL8, CCL11, CCL15, CCL17, CCL19, CCL20, CCL21, CCL25, CCR3, CCR4, CD16A, CD19, CD20, CD24, CD27, CD28, CD30, CD38, CD39, CD40, CD40L, CD47, CD52, CD70, CD80, CD86, CD123, CD133, CD137, CD137L, CD160, CD272, CEACAM5, CLEC9, CLEC91, CRTH2, CSF-1, CSF-2, CSF-3, CXCL1, CXCL2, CXCL4, CXCL12, CXCL13, CXCR3, cMet, CTLA4, DLL3, DLL4, DNGR-1, E-cadherin, EGFR, ENTPD1, EpCAM, FCER1, FCER1A, FCER2, FGFR, FLAP, FOLH1, Gi24, GITR, GITRL, GPR5, GP100, GPRC5D, HER2, HER3, ICOSL, ICOS, HHLA2, HMGB1, HVEM, IDO, IFNa, IgE, IGF1R, IL2Rbeta, IL1, ILIA, IL1B, IL1F10, IL2, IL4, IL4Ra, IL5, IL5R, IL6, IL7, IL7Ra, IL8, IL9, IL9R, IL10, rhILlO, IL12, IL13, IL13Ra1, IL13Ra2, IL15, IL17, IL17Rb, IL18, IL22, IL23, IL25, IL7, IL33, IL35, ITGB4, ITK, KIR, LAG3, LAMP1, leptin, LPFS2, MHC class II, MUC-1, MUC-16, NCR3LG1, NKG2D, NKp46, NTPDase-1, OX40, OX40L, PD-1, PD-L1, PD-L2, PROM1, S152, SIRPalpha, SISP1, SLC, SPG64, ST2, STEAP1, STEAP2, Syk kinase, STEAP1, TROP2, TACI, TDO, TGFBETA, T14, TIGIT, TIM3, TLR, TLR2, TLR4, TLR5, TLR9, TMEF1, TNFa, TNFRSF7, Tp55, TREM1, TSLP, TSLPR, TWEAK, VEGF, VISTA, Vstm3, or WUCAM. The VL1, VL4, VH1, and/or VH4 may specifically bind to cMet, Trop2, CD20, or CD19; VL2 and/or VH2 may specifically bind to CD28; and VL3 and/or VH3 may specifically bind to CD3. For example, the antigen binding polypeptide complex may specifically bind CD28, CD3, cMet, and Trop2. For example, the antigen binding polypeptide complex may specifically bind CD28, CD3, CD19, and CD20. For example, VL1 and VH1 may specifically bind to cMet. For example, VL4 and VH4 may specifically bind to cMet. For example, VL1 and VH1 may specifically bind to Trop2. For example, VL4 and VH4 may specifically bind to Trop2. For example, VL1 and VH1 may specifically bind to CD19. For example, VL4 and VH4 may specifically bind to CD19. For example, VL1 and VH1 may specifically bind to CD20. For example, VL4 and VH4 may specifically bind to CD20.

[0194] In some aspects, the invention is directed to an antigen binding polypeptide complex comprising a first polypeptide and a second polypeptide; wherein the first polypeptide has a structure represented by VL1-L1-VL2-L2-VH2-L3-VH1-L4-CH1-L5-Fc; VH1-L6-VH2-L7-VL2-L8-VL1-L9-CH1-L10-Fc; VL1-L11-VL2-L12-VH2-L13-VH1-L14-CL-L15-Fc; VH1-L16-VH2-L17-VL2-L18-VL1-L19-CL-L20-Fc; VL1-L21-VL2-L22-VH2-L23-VH1-L24-CH1-L25-CL-L26-Fc; VH1-L27-VH2-L28-VL2-L29-VL1-L30-CH1-L31-CL-L32-Fc; VL1-L33-VL2-L34-VH2-L35-VH1-L36-CL-L37-CH1-L38-Fc; or VH1-L39-VH2-L40-VL2-L41-VL1-L42-CL-L43-CH1-L44-Fc; wherein the second polypeptide has a structure represented by VL3-L45-VL4-L46-VH4-L47-VH3-L48-CH1-L49-Fc; VH3-L50-VH4-L51-VL4-L52-VL3-L53-CH1-L54-Fc; VL3-L55-VL4-L56-VH4-L57-VH3-L58-CL-L59-Fc; VH3-L60-VH4-L61-VL4-L62-VL3-L63-CL-L64-Fc; VL3-L65-VL4-L66-VH4-L67-VH3-L68-CH1-L69-CL-L70-Fc; VH3-L71-VH4-L72-VL4-L73-VL3-L74-CH1-L75-CL-L76-Fc; VL3-L77-VL4-L78-VH4-L79-VH3-L80-CL-L81-CH1-L82-Fc; or VH3-L83-VH4-L84-VL4-L85-VL3-L86-CL-L87-CH1-L88-Fc; wherein VL1 is a first immunoglobulin light chain variable region that specifically binds to A2AR, APRIL, ATPDase, BAFF, BAFFR, BCMA, BlyS, BTK, BTLA, B7DC, B7H1, B7H2, B7H3, B7H4, B7H5, B7H6, B7H7, B7RP1, B7-4, C3, C5, CCL2, CCL3, CCL4, CCL5, CCL7, CCL8, CCL11, CCL15, CCL17, CCL19, CCL20, CCL21, CCL25, CCR3, CCR4, CD16A, CD19, CD20, CD24, CD27, CD28, CD30, CD38, CD39, CD40, CD40L, CD47, CD52, CD70, CD80, CD86, CD123, CD133, CD137, CD137L, CD160, CD272, CEACAM5, CLEC9, CLEC91, CRTH2, CSF-1, CSF-2, CSF-3, CXCL1, CXCL2, CXCL4, CXCL12, CXCL13, CXCR3, cMet, CTLA4, DLL3, DLL4, DNGR-1, E-cadherin, EGFR, ENTPD1, EpCAM, FCER1, FCER1A, FCER2, FGFR, FLAP, FOLH1, Gi24, GITR, GITRL, GPR5, GP100, GPRC5D, HER2, HER3, ICOSL, ICOS, HHLA2, HMGB1, HVEM, IDO, IFNa, IgE, IGF1R, IL2Rbeta, IL1, ILIA, IL1B, IL1F10, IL2, IL4, IL4Ra, IL5, IL5R, IL6, IL7, IL7Ra, IL8, IL9, IL9R, IL10, rhILlO, IL12, IL13, IL13Ra1, IL13Ra2, IL15, IL17, IL17Rb, IL18, IL22, IL23, IL25, IL7, IL33, IL35, ITGB4, ITK, KIR, LAG3, LAMP1, leptin, LPFS2, MHC class II, MUC-1, MUC-16, NCR3LG1, NKG2D, NKp46, NTPDase-1, OX40, OX40L, PD-1, PD-L1, PD-L2, PROM1, 5152, SIRPalpha, SISP1, SLC, SPG64, ST2, STEAP1, STEAP2, Syk kinase, STEAP1, TROP2, TACI, TDO, TGFBETA, T14, TIGIT, TIM3, TLR, TLR2, TLR4, TLR5, TLR9, TMEF1, TNFa, TNFRSF7, Tp55, TREM1, TSLP, TSLPR, TWEAK, VEGF, VISTA, Vstm3, or WUCAM; VL2 is a second immunoglobulin light chain variable region that specifically binds to A2AR, APRIL, ATPDase, BAFF, BAFFR, BCMA, BlyS, BTK, BTLA, B7DC, B7H1, B7H2, B7H3, B7H4, B7H5, B7H6, B7H7, B7RP1, B7-4, C3, C5, CCL2, CCL3, CCL4, CCL5, CCL7, CCL8, CCL11, CCL15, CCL17, CCL19, CCL20, CCL21, CCL25, CCR3, CCR4, CD16A, CD19, CD20, CD24, CD27, CD28, CD30, CD38, CD39, CD40, CD40L, CD47, CD52, CD70, CD80, CD86, CD123, CD133, CD137, CD137L, CD160, CD272, CEACAM5, CLEC9, CLEC91, CRTH2, CSF-1, CSF-2, CSF-3, CXCL1, CXCL2, CXCL4, CXCL12, CXCL13, CXCR3, cMet, CTLA4, DLL3, DLL4, DNGR-1, E-cadherin, EGFR, ENTPD1, EpCAM, FCER1, FCER1A, FCER2, FGFR, FLAP, FOLH1, Gi24, GITR, GITRL, GPR5, GP100, GPRC5D, HER2, HER3, ICOSL, ICOS, HHLA2, HMGB1, HVEM, IDO, IFNa, IgE, IGF1R, IL2Rbeta, IL1, ILIA, IL1B, IL1F10, IL2, IL4, IL4Ra, IL5, IL5R, IL6, IL7, IL7Ra, IL8, IL9, IL9R, IL10, rhILlO, IL12, IL13, IL13Ra1, IL13Ra2, IL15, IL17, IL17Rb, IL18, IL22, IL23, IL25, IL7, IL33, IL35, ITGB4, ITK, KIR, LAG3, LAMP1, leptin, LPFS2, MHC class II, MUC-1, MUC-16, NCR3LG1, NKG2D, NKp46, NTPDase-1, OX40, OX40L, PD-1, PD-L1, PD-L2, PROM1, 5152, SIRPalpha, SISP1, SLC, SPG64, ST2, STEAP1, STEAP2, Syk kinase, STEAP1, TROP2, TACI, TDO, TGFBETA, T14, TIGIT, TIM3, TLR, TLR2, TLR4, TLR5, TLR9, TMEF1, TNFa, TNFRSF7, Tp55, TREM1, TSLP, TSLPR, TWEAK, VEGF, VISTA, Vstm3, or WUCAM; VL3 is a third immunoglobulin light chain variable region that specifically binds to CD3; VL4 is a fourth immunoglobulin light chain variable region that specifically binds to CD28; VH1 is a first immunoglobulin heavy chain variable region that specifically binds to A2AR, APRIL, ATPDase, BAFF, BAFFR, BCMA, BlyS, BTK, BTLA, B7DC, B7H1, B7H2, B7H3, B7H4, B7H5, B7H6, B7H7, B7RP1, B7-4, C3, C5, CCL2, CCL3, CCL4, CCL5, CCL7, CCL8, CCL11, CCL15, CCL17, CCL19, CCL20, CCL21, CCL25, CCR3, CCR4, CD16A, CD19, CD20, CD24, CD27, CD28, CD30, CD38, CD39, CD40, CD40L, CD47, CD52, CD70, CD80, CD86, CD123, CD133, CD137, CD137L, CD160, CD272, CEACAM5, CLEC9, CLEC91, CRTH2, CSF-1, CSF-2, CSF-3, CXCL1, CXCL2, CXCL4, CXCL12, CXCL13, CXCR3, cMet, CTLA4, DLL3, DLL4, DNGR-1, E-cadherin, EGFR, ENTPD1, EpCAM, FCER1, FCER1A, FCER2, FGFR, FLAP, FOLH1, Gi24, GITR, GITRL, GPR5, GP100, GPRC5D, HER2, HER3, ICOSL, ICOS, HHLA2, HMGB1, HVEM, IDO, IFNa, IgE, IGF1R, IL2Rbeta, IL1, ILIA, IL1B, IL1F10, IL2, IL4, IL4Ra, IL5, IL5R, IL6, IL7, IL7Ra, IL8, IL9, IL9R, IL10, rhILlO, IL12, IL13, IL13Ra1, IL13Ra2, IL15, IL17, IL17Rb, IL18, IL22, IL23, IL25, IL7, IL33, IL35, ITGB4, ITK, KIR, LAG3, LAMP1, leptin, LPFS2, MHC class II, MUC-1, MUC-16, NCR3LG1, NKG2D, NKp46, NTPDase-1, OX40, OX40L, PD-1, PD-L1, PD-L2, PROM1, S152, SIRPalpha, SISP1, SLC, SPG64, ST2, STEAP1, STEAP2, Syk kinase, STEAP1, TROP2, TACI, TDO, TGFBETA, T14, TIGIT, TIM3, TLR, TLR2, TLR4, TLR5, TLR9, TMEF1, TNFa, TNFRSF7, Tp55, TREM1, TSLP, TSLPR, TWEAK, VEGF, VISTA, Vstm3, or WUCAM; VH2 is a second immunoglobulin heavy chain variable region that specifically binds to A2AR, APRIL, ATPDase, BAFF, BAFFR, BCMA, BlyS, BTK, BTLA, B7DC, B7H1, B7H2, B7H3, B7H4, B7H5, B7H6, B7H7, B7RP1, B7-4, C3, C5, CCL2, CCL3, CCL4, CCL5, CCL7, CCL8, CCL11, CCL15, CCL17, CCL19, CCL20, CCL21, CCL25, CCR3, CCR4, CD16A, CD19, CD20, CD24, CD27, CD28, CD30, CD38, CD39, CD40, CD40L, CD47, CD52, CD70, CD80, CD86, CD123, CD133, CD137, CD137L, CD160, CD272, CEACAM5, CLEC9, CLEC91, CRTH2, CSF-1, CSF-2, CSF-3, CXCL1, CXCL2, CXCL4, CXCL12, CXCL13, CXCR3, cMet, CTLA4, DLL3, DLL4, DNGR-1, E-cadherin, EGFR, ENTPD1, EpCAM, FCER1, FCER1A, FCER2, FGFR, FLAP, FOLH1, Gi24, GITR, GITRL, GPR5, GP100, GPRC5D, HER2, HER3, ICOSL, ICOS, HHLA2, HMGB1, HVEM, IDO, IFNa, IgE, IGF1R, IL2Rbeta, IL1, ILIA, IL1B, IL1F10, IL2, IL4, IL4Ra, IL5, IL5R, IL6, IL7, IL7Ra, IL8, IL9, IL9R, IL10, rhILlO, IL12, IL13, IL13Ra1, IL13Ra2, IL15, IL17, IL17Rb, IL18, IL22, IL23, IL25, IL7, IL33, IL35, ITGB4, ITK, KIR, LAG3, LAMP1, leptin, LPFS2, MHC class II, MUC-1, MUC-16, NCR3LG1, NKG2D, NKp46, NTPDase-1, OX40, OX40L, PD-1, PD-L1, PD-L2, PROM1, S152, SIRPalpha, SISP1, SLC, SPG64, ST2, STEAP1, STEAP2, Syk kinase, STEAP1, TROP2, TACI, TDO, TGFBETA, T14, TIGIT, TIM3, TLR, TLR2, TLR4, TLR5, TLR9, TMEF1, TNFa, TNFRSF7, Tp55, TREM1, TSLP, TSLPR, TWEAK, VEGF, VISTA, Vstm3, or WUCAM; VH3 is a third immunoglobulin heavy chain variable region that specifically binds to CD3; VH4 is a fourth immunoglobulin heavy chain variable region that specifically binds to CD28; Fc is a region comprising an immunoglobulin heavy chain constant region 2 (CH2), an immunoglobulin heavy chain constant region 3 (CH3), and optionally, an immunoglobulin hinge; CH1 is an immunoglobulin heavy chain constant region 1; CL is an immunoglobulin light chain constant region; and L1-L88 are amino acid linkers. In some aspects, the first polypeptide has a structure represented by VL1-L1-VL2-L2-VH2-L3-VH1-L4-CH1-L5-Fc; VH1-L6-VH2-L7-VL2-L8-VL1-L9-CH1-L10-Fc; VL1-L11-VL2-L12-VH2-L13-VH1-L14-CL-L15-Fc; VH1-L16-VH2-L17-VL2-L18-VL1-L19-CL-L20-Fc; VL1-L21-VL2-L22-VH2-L23-VH1-L24-CH1-L25-CL-L26-Fc; VH1-L27-VH2-L28-VL2-L29-VL1-L30-CH1-L31-CL-L32-Fc; VL1-L33-VL2-L34-VH2-L35-VH1-L36-CL-L37-CH1-L38-Fc; or VH1-L39-VH2-L40-VL2-L41-VL1-L42-CL-L43-CH1-L44-Fc and the second polypeptide has a structure represented by VL3-L45-VL4-L46-VH4-L47-VH3-L48-CH1-L49-Fc. In some aspects, the first polypeptide has a structure represented by VL1-L1-VL2-L2-VH2-L3-VH1-L4-CH1-L5-Fc; VH1-L6-VH2-L7-VL2-L8-VL1-L9-CH1-L10-Fc; VL1-L11-VL2-L12-VH2-L13-VH1-L14-CL-L15-Fc; VH1-L16-VH2-L17-VL2-L18-VL1-L19-CL-L20-Fc; VL1-L21-VL2-L22-VH2-L23-VH1-L24-CH1-L25-CL-L26-Fc; VH1-L27-VH2-L28-VL2-L29-VL1-L30-CH1-L31-CL-L32-Fc; VL1-L33-VL2-L34-VH2-L35-VH1-L36-CL-L37-CH1-L38-Fc; or VH1-L39-VH2-L40-VL2-L41-VL1-L42-CL-L43-CH1-L44-Fc and the second polypeptide has a structure represented by VH3-L50-VH4-L51-VL4-L52-VL3-L53-CH1-L54-Fc. In some aspects, the first polypeptide has a structure represented by VL1-L1-VL2-L2-VH2-L3-VH1-L4-CH1-L5-Fc; VH1-L6-VH2-L7-VL2-L8-VL1-L9-CH1-L10-Fc; VL1-L11-VL2-L12-VH2-L13-VH1-L14-CL-L15-Fc; VH1-L16-VH2-L17-VL2-L18-VL1-L19-CL-L20-Fc; VL1-L21-VL2-L22-VH2-L23-VH1-L24-CH1-L25-CL-L26-Fc; VH1-L27-VH2-L28-VL2-L29-VL1-L30-CH1-L31-CL-L32-Fc; VL1-L33-VL2-L34-VH2-L35-VH1-L36-CL-L37-CH1-L38-Fc; or VH1-L39-VH2-L40-VL2-L41-VL1-L42-CL-L43-CH1-L44-Fc and the second polypeptide has a structure represented by VL3-L55-VL4-L56-VH4-L57-VH3-L58-CL-L59-Fc. In some aspects, the first polypeptide has a structure represented by VL1-L1-VL2-L2-VH2-L3-VH1-L4-CH1-L5-Fc; VH1-L6-VH2-L7-VL2-L8-VL1-L9-CH1-L10-Fc; VL1-L11-VL2-L12-VH2-L13-VH1-L14-CL-L15-Fc; VH1-L16-VH2-L17-VL2-L18-VL1-L19-CL-L20-Fc; VL1-L21-VL2-L22-VH2-L23-VH1-L24-CH1-L25-CL-L26-Fc; VH1-L27-VH2-L28-VL2-L29-VL1-L30-CH1-L31-CL-L32-Fc; VL1-L33-VL2-L34-VH2-L35-VH1-L36-CL-L37-CH1-L38-Fc; or VH1-L39-VH2-L40-VL2-L41-VL1-L42-CL-L43-CH1-L44-Fc and the second polypeptide has a structure represented by VH3-L60-VH4-L61-VL4-L62-VL3-L63-CL-L64-Fc. In some aspects, the first polypeptide has a structure represented by VL1-L1-VL2-L2-VH2-L3-VH1-L4-CH1-L5-Fc; VH1-L6-VH2-L7-VL2-L8-VL1-L9-CH1-L10-Fc; VL1-L11-VL2-L12-VH2-L13-VH1-L14-CL-L15-Fc; VH1-L16-VH2-L17-VL2-L18-VL1-L19-CL-L20-Fc; VL1-L21-VL2-L22-VH2-L23-VH1-L24-CH1-L25-CL-L26-Fc; VH1-L27-VH2-L28-VL2-L29-VL1-L30-CH1-L31-CL-L32-Fc; VL1-L33-VL2-L34-VH2-L35-VH1-L36-CL-L37-CH1-L38-Fc; or VH1-L39-VH2-L40-VL2-L41-VL1-L42-CL-L43-CH1-L44-Fc and the second polypeptide has a structure represented by VL3-L65-VL4-L66-VH4-L67-VH3-L68-CH1-L69-CL-L70-Fc. In some aspects, the first polypeptide has a structure represented by VL1-L1-VL2-L2-VH2-L3-VH1-L4-CH1-L5-Fc; VH1-L6-VH2-L7-VL2-L8-VL1-L9-CH1-L10-Fc; VL1-L11-VL2-L12-VH2-L13-VH1-L14-CL-L15-Fc; VH1-L16-VH2-L17-VL2-L18-VL1-L19-CL-L20-Fc; VL1-L21-VL2-L22-VH2-L23-VH1-L24-CH1-L25-CL-L26-Fc; VH1-L27-VH2-L28-VL2-L29-VL1-L30-CH1-L31-CL-L32-Fc; VL1-L33-VL2-L34-VH2-L35-VH1-L36-CL-L37-CH1-L38-Fc; or VH1-L39-VH2-L40-VL2-L41-VL1-L42-CL-L43-CH1-L44-Fc and the second polypeptide has a structure represented by VH3-L71-VH4-L72-VL4-L73-VL3-L74-CH1-L75-CL-L76-Fc. In some aspects, the first polypeptide has a structure represented by VL1-L1-VL2-L2-VH2-L3-VH1-L4-CH1-L5-Fc; VH1-L6-VH2-L7-VL2-L8-VL1-L9-CH1-L10-Fc; VL1-L11-VL2-L12-VH2-L13-VH1-L14-CL-L15-Fc; VH1-L16-VH2-L17-VL2-L18-VL1-L19-CL-L20-Fc; VL1-L21-VL2-L22-VH2-L23-VH1-L24-CH1-L25-CL-L26-Fc; VH1-L27-VH2-L28-VL2-L29-VL1-L30-CH1-L31-CL-L32-Fc; VL1-L33-VL2-L34-VH2-L35-VH1-L36-CL-L37-CH1-L38-Fc; or VH1-L39-VH2-L40-VL2-L41-VL1-L42-CL-L43-CH1-L44-Fc and the second polypeptide has a structure represented by VL3-L77-VL4-L78-VH4-L79-VH3-L80-CL-L81-CH1-L82-Fc. In some aspects, the first polypeptide has a structure represented by VL1-L1-VL2-L2-VH2-L3-VH1-L4-CH1-L5-Fc; VH1-L6-VH2-L7-VL2-L8-VL1-L9-CH1-L10-Fc; VL1-L11-VL2-L12-VH2-L13-VH1-L14-CL-L15-Fc; VH1-L16-VH2-L17-VL2-L18-VL1-L19-CL-L20-Fc; VL1-L21-VL2-L22-VH2-L23-VH1-L24-CH1-L25-CL-L26-Fc; VH1-L27-VH2-L28-VL2-L29-VL1-L30-CH1-L31-CL-L32-Fc; VL1-L33-VL2-L34-VH2-L35-VH1-L36-CL-L37-CH1-L38-Fc; or VH1-L39-VH2-L40-VL2-L41-VL1-L42-CL-L43-CH1-L44-Fc and the second polypeptide has a structure represented by VH3-L83-VH4-L84-VL4-L85-VL3-L86-CL-L87-CH1-L88-Fc. In some aspects, VL1 and VH1 may specifically bind to A2AR, APRIL, ATPDase, BAFF, BAFFR, BCMA, BlyS, BTK, BTLA, B7DC, B7H1, B7H2, B7H3, B7H4, B7H5, B7H6, B7H7, B7RP1, B7-4, C3, C5, CCL2, CCL3, CCL4, CCL5, CCL7, CCL8, CCL11, CCL15, CCL17, CCL19, CCL20, CCL21, CCL25, CCR3, CCR4, CD16A, CD19, CD20, CD24, CD27, CD28, CD30, CD38, CD39, CD40, CD40L, CD47, CD52, CD70, CD80, CD86, CD123, CD133, CD137, CD137L, CD160, CD272, CEACAM5, CLEC9, CLEC91, CRTH2, CSF-1, CSF-2, CSF-3, CXCL1, CXCL2, CXCL4, CXCL12, CXCL13, CXCR3, cMet, CTLA4, DLL3, DLL4, DNGR-1, E-cadherin, EGFR, ENTPD1, EpCAM, FCER1, FCER1A, FCER2, FGFR, FLAP, FOLH1, Gi24, GITR, GITRL, GPR5, GP100, GPRC5D, HER2, HER3, ICOSL, ICOS, HHLA2, HMGB1, HVEM, IDO, IFNa, IgE, IGF1R, IL2Rbeta, IL1, ILIA, IL1B, IL1F10, IL2, IL4, IL4Ra, IL5, IL5R, IL6, IL7, IL7Ra, IL8, IL9, IL9R, IL10, rhILlO, IL12, IL13, IL13Ra1, IL13Ra2, IL15, IL17, IL17Rb, IL18, IL22, IL23, IL25, IL7, IL33, IL35, ITGB4, ITK, KIR, LAG3, LAMP1, leptin, LPFS2, MHC class II, MUC-1, MUC-16, NCR3LG1, NKG2D, NKp46, NTPDase-1, OX40, OX40L, PD-1, PD-L1, PD-L2, PROM1, 5152, SIRPalpha, SISP1, SLC, SPG64, ST2, STEAP1, STEAP2, Syk kinase, STEAP1, TROP2, TACI, TDO, TGFBETA, T14, TIGIT, TIM3, TLR, TLR2, TLR4, TLR5, TLR9, TMEF1, TNFa, TNFRSF7, Tp55, TREM1, TSLP, TSLPR, TWEAK, VEGF, VISTA, Vstm3, or WUCAM. In some aspects, VL2 and VH2 may specifically bind to A2AR, APRIL, ATPDase, BAFF, BAFFR, BCMA, BlyS, BTK, BTLA, B7DC, B7H1, B7H2, B7H3, B7H4, B7H5, B7H6, B7H7, B7RP1, B7-4, C3, C5, CCL2, CCL3, CCL4, CCL5, CCL7, CCL8, CCL11, CCL15, CCL17, CCL19, CCL20, CCL21, CCL25, CCR3, CCR4, CD16A, CD19, CD20, CD24, CD27, CD28, CD30, CD38, CD39, CD40, CD40L, CD47, CD52, CD70, CD80, CD86, CD123, CD133, CD137, CD137L, CD160, CD272, CEACAM5, CLEC9, CLEC91, CRTH2, CSF-1, CSF-2, CSF-3, CXCL1, CXCL2, CXCL4, CXCL12, CXCL13, CXCR3, cMet, CTLA4, DLL3, DLL4, DNGR-1, E-cadherin, EGFR, ENTPD1, EpCAM, FCER1, FCER1A, FCER2, FGFR, FLAP, FOLH1, Gi24, GITR, GITRL, GPR5, GP100, GPRC5D, HER2, HER3, ICOSL, ICOS, HHLA2, HMGB1, HVEM, IDO, IFNa, IgE, IGF1R, IL2Rbeta, IL1, ILIA, IL1B, IL1F10, IL2, IL4, IL4Ra, IL5, IL5R, IL6, IL7, IL7Ra, IL8, IL9, IL9R, IL10, rhILlO, IL12, IL13, IL13Ra1, IL13Ra2, IL15, IL17, IL17Rb, IL18, IL22, IL23, IL25, IL7, IL33, IL35, ITGB4, ITK, KIR, LAG3, LAMP1, leptin, LPFS2, MHC class II, MUC-1, MUC-16, NCR3LG1, NKG2D, NKp46, NTPDase-1, OX40, OX40L, PD-1, PD-L1, PD-L2, PROM1, S152, SIRPalpha, SISP1, SLC, SPG64, ST2, STEAP1, STEAP2, Syk kinase, STEAP1, TROP2, TACI, TDO, TGFBETA, T14, TIGIT, TIM3, TLR, TLR2, TLR4, TLR5, TLR9, TMEF1, TNFa, TNFRSF7, Tp55, TREM1, TSLP, TSLPR, TWEAK, VEGF, VISTA, Vstm3, or WUCAM. The VL1, VL2, VH1, and/or VH2 may specifically bind to cMet, Trop2, CD20, or CD19; VL3 and/or VH3 may specifically bind to CD3; and VL4 and/or VH4 may specifically bind to CD28. For example, the antigen binding polypeptide complex may specifically bind CD28, CD3, cMet, and Trop2. For example, the antigen binding polypeptide complex may specifically bind CD28, CD3, CD19, and CD20. For example, VL1 and VH1 may specifically bind to cMet. For example, VL2 and VH2 may specifically bind to cMet. For example, VL1 and VH1 may specifically bind to Trop2. For example, VL2 and VH2 may specifically bind to Trop2. For example, VL1 and VH1 may specifically bind to CD19. For example, VL2 and VH2 may specifically bind to CD19. For example, VL1 and VH1 may specifically bind to CD20. For example, VL2 and VH2 may specifically bind to CD20.

[0195] In some aspects of the antibody polypeptide complex described herein, VL3 and VH3 specifically bind to CD3, VL4 and VH4 specifically bind to CD28, VL2 and VH2 specifically bind to Trop2, and VL1 and VH1 specifically bind to cMet. In some aspects, VL3 and VH3 specifically bind to CD3, VL4 and VH4 specifically bind to CD28, VL2 and VH2 specifically bind to cMet, and VL1 and VH1 specifically bind to Trop2. In some aspects, VL3 and VH3 specifically bind to CD3, VL4 and VH4 specifically bind to Trop2, VL2 and VH2 specifically bind to CD28, and VL1 and VH1 specifically bind to cMet. In some aspects, VL3 and VH3 specifically bind to CD3, VL4 and VH4 specifically bind to Trop2, VL2 and VH2 specifically bind to cMet, and VL1 and VH1 specifically bind to CD28. In some aspects, VL3 and VH3 specifically bind to CD3, VL4 and VH4 specifically bind to cMet, VL2 and VH2 specifically bind to Trop2, and VL1 and VH1 specifically bind to CD28. In some aspects, VL3 and VH3 specifically bind to CD3, VL4 and VH4 specifically bind to cMet, VL2 and VH2 specifically bind to CD28, and VL1 and VH1 specifically bind to Trop2. In some aspects, VL3 and VH3 specifically bind to CD3, VL4 and VH4 specifically bind to CD28, VL2 and VH2 specifically bind to CD20, and VL1 and VH1 specifically bind to CD19. In some aspects, VL3 and VH3 specifically bind to CD3, VL4 and VH4 specifically bind to CD28, VL2 and VH2 specifically bind to CD19, and VL1 and VH1 specifically bind to CD20. In some aspects, VL3 and VH3 specifically bind to CD3, VL4 and VH4 specifically bind to CD20, VL2 and VH2 specifically bind to CD28, and VL1 and VH1 specifically bind to CD19. In some aspects, VL3 and VH3 specifically bind to CD3, VL4 and VH4 specifically bind to CD20, VL2 and VH2 specifically bind to CD19, and VL1 and VH1 specifically bind to CD28. In some aspects, VL3 and VH3 specifically bind to CD3, VL4 and VH4 specifically bind to CD19, VL2 and VH2 specifically bind to CD20, and VL1 and VH1 specifically bind to CD28. In some aspects, VL3 and VH3 specifically bind to CD3, VL4 and VH4 specifically bind to CD19, VL2 and VH2 specifically bind to CD28, and VL1 and VH1 specifically bind to CD20.

[0196] In some aspects, the invention is directed to an antigen binding polypeptide complex comprising a first polypeptide and a second polypeptide; wherein the first polypeptide has a structure represented by VL1-L1-VL2-L2-VH2-L3-VH1-L4-CH1-L5-Fc; VH1-L6-VH2-L7-VL2-L8-VL1-L9-CH1-L10-Fc; VL1-L11-VL2-L12-VH2-L13-VH1-L14-CL-L15-Fc; VH1-L16-VH2-L17-VL2-L18-VL1-L19-CL-L20-Fc; VL1-L21-VL2-L22-VH2-L23-VH1-L24-CH1-L25-CL-L26-Fc; VH1-L27-VH2-L28-VL2-L29-VL1-L30-CH1-L31-CL-L32-Fc; VL1-L33-VL2-L34-VH2-L35-VH1-L36-CL-L37-CH1-L38-Fc; or VH1-L39-VH2-L40-VL2-L41-VL1-L42-CL-L43-CH1-L44-Fc; wherein the second polypeptide has a structure represented by VL3-L45-VL4-L46-VH4-L47-VH3-L48-CH1-L49-Fc; VH3-L50-VH4-L51-VL4-L52-VL3-L53-CH1-L54-Fc; VL3-L55-VL4-L56-VH4-L57-VH3-L58-CL-L59-Fc; VH3-L60-VH4-L61-VL4-L62-VL3-L63-CL-L64-Fc; VL3-L65-VL4-L66-VH4-L67-VH3-L68-CH1-L69-CL-L70-Fc; VH3-L71-VH4-L72-VL4-L73-VL3-L74-CH1-L75-CL-L76-Fc; VL3-L77-VL4-L78-VH4-L79-VH3-L80-CL-L81-CH1-L82-Fc; or VH3-L83-VH4-L84-VL4-L85-VL3-L86-CL-L87-CH1-L88-Fc; wherein VL1 is a first immunoglobulin light chain variable region that specifically binds to A2AR, APRIL, ATPDase, BAFF, BAFFR, BCMA, BlyS, BTK, BTLA, B7DC, B7H1, B7H2, B7H3, B7H4, B7H5, B7H6, B7H7, B7RP1, B7-4, C3, C5, CCL2, CCL3, CCL4, CCL5, CCL7, CCL8, CCL11, CCL15, CCL17, CCL19, CCL20, CCL21, CCL25, CCR3, CCR4, CD16A, CD19, CD20, CD24, CD27, CD28, CD30, CD38, CD39, CD40, CD40L, CD47, CD52, CD70, CD80, CD86, CD123, CD133, CD137, CD137L, CD160, CD272, CEACAM5, CLEC9, CLEC91, CRTH2, CSF-1, CSF-2, CSF-3, CXCL1, CXCL2, CXCL4, CXCL12, CXCL13, CXCR3, cMet, CTLA4, DLL3, DLL4, DNGR-1, E-cadherin, EGFR, ENTPD1, EpCAM, FCER1, FCER1A, FCER2, FGFR, FLAP, FOLH1, Gi24, GITR, GITRL, GPR5, GP100, GPRC5D, HER2, HER3, ICOSL, ICOS, HHLA2, HMGB1, HVEM, IDO, IFNa, IgE, IGF1R, IL2Rbeta, IL1, ILIA, IL1B, IL1F10, IL2, IL4, IL4Ra, IL5, IL5R, IL6, IL7, IL7Ra, IL8, IL9, IL9R, IL10, rhILlO, IL12, IL13, IL13Ra1, IL13Ra2, IL15, IL17, IL17Rb, IL18, IL22, IL23, IL25, IL7, IL33, IL35, ITGB4, ITK, KIR, LAG3, LAMP1, leptin, LPFS2, MHC class II, MUC-1, MUC-16, NCR3LG1, NKG2D, NKp46, NTPDase-1, OX40, OX40L, PD-1, PD-L1, PD-L2, PROM1, S152, SIRPalpha, SISP1, SLC, SPG64, ST2, STEAP1, STEAP2, Syk kinase, STEAP1, TROP2, TACI, TDO, TGFBETA, T14, TIGIT, TIM3, TLR, TLR2, TLR4, TLR5, TLR9, TMEF1, TNFa, TNFRSF7, Tp55, TREM1, TSLP, TSLPR, TWEAK, VEGF, VISTA, Vstm3, or WUCAM; VL2 is a second immunoglobulin light chain variable region that specifically binds to A2AR, APRIL, ATPDase, BAFF, BAFFR, BCMA, BlyS, BTK, BTLA, B7DC, B7H1, B7H2, B7H3, B7H4, B7H5, B7H6, B7H7, B7RP1, B7-4, C3, C5, CCL2, CCL3, CCL4, CCL5, CCL7, CCL8, CCL11, CCL15, CCL17, CCL19, CCL20, CCL21, CCL25, CCR3, CCR4, CD16A, CD19, CD20, CD24, CD27, CD28, CD30, CD38, CD39, CD40, CD40L, CD47, CD52, CD70, CD80, CD86, CD123, CD133, CD137, CD137L, CD160, CD272, CEACAM5, CLEC9, CLEC91, CRTH2, CSF-1, CSF-2, CSF-3, CXCL1, CXCL2, CXCL4, CXCL12, CXCL13, CXCR3, cMet, CTLA4, DLL3, DLL4, DNGR-1, E-cadherin, EGFR, ENTPD1, EpCAM, FCER1, FCER1A, FCER2, FGFR, FLAP, FOLH1, Gi24, GITR, GITRL, GPR5, GP100, GPRC5D, HER2, HER3, ICOSL, ICOS, HHLA2, HMGB1, HVEM, IDO, IFNa, IgE, IGF1R, IL2Rbeta, IL1, ILIA, IL1B, IL1F10, IL2, IL4, IL4Ra, IL5, IL5R, IL6, IL7, IL7Ra, IL8, IL9, IL9R, IL10, rhILlO, IL12, IL13, IL13Ra1, IL13Ra2, IL15, IL17, IL17Rb, IL18, IL22, IL23, IL25, IL7, IL33, IL35, ITGB4, ITK, KIR, LAG3, LAMP1, leptin, LPFS2, MHC class II, MUC-1, MUC-16, NCR3LG1, NKG2D, NKp46, NTPDase-1, OX40, OX40L, PD-1, PD-L1, PD-L2, PROM1, S152, SIRPalpha, SISP1, SLC, SPG64, ST2, STEAP1, STEAP2, Syk kinase, STEAP1, TROP2, TACI, TDO, TGFBETA, T14, TIGIT, TIM3, TLR, TLR2, TLR4, TLR5, TLR9, TMEF1, TNFa, TNFRSF7, Tp55, TREM1, TSLP, TSLPR, TWEAK, VEGF, VISTA, Vstm3, or WUCAM; VL3 is a third immunoglobulin light chain variable region that specifically binds to A2AR, APRIL, ATPDase, BAFF, BAFFR, BCMA, BlyS, BTK, BTLA, B7DC, B7H1, B7H2, B7H3, B7H4, B7H5, B7H6, B7H7, B7RP1, B7-4, C3, C5, CCL2, CCL3, CCL4, CCL5, CCL7, CCL8, CCL11, CCL15, CCL17, CCL19, CCL20, CCL21, CCL25, CCR3, CCR4, CD16A, CD19, CD20, CD24, CD27, CD28, CD30, CD38, CD39, CD40, CD40L, CD47, CD52, CD70, CD80, CD86, CD123, CD133, CD137, CD137L, CD160, CD272, CEACAM5, CLEC9, CLEC91, CRTH2, CSF-1, CSF-2, CSF-3, CXCL1, CXCL2, CXCL4, CXCL12, CXCL13, CXCR3, cMet, CTLA4, DLL3, DLL4, DNGR-1, E-cadherin, EGFR, ENTPD1, EpCAM, FCER1, FCER1A, FCER2, FGFR, FLAP, FOLH1, Gi24, GITR, GITRL, GPR5, GP100, GPRC5D, HER2, HER3, ICOSL, ICOS, HHLA2, HMGB1, HVEM, IDO, IFNa, IgE, IGF1R, IL2Rbeta, IL1, ILIA, IL1B, IL1F10, IL2, IL4, IL4Ra, IL5, TL5R, IL6, IL7, IL7Ra, IL8, IL9, IL9R, IL10, rhILlO, IL12, IL13, IL13Ra1, IL13Ra2, IL15, IL17, IL17Rb, IL18, IL22, IL23, IL25, IL7, IL33, IL35, ITGB4, ITK, KIR, LAG3, LAMP1, leptin, LPFS2, MHC class II, MUC-1, MUC-16, NCR3LG1, NKG2D, NKp46, NTPDase-1, OX40, OX40L, PD-1, PD-L1, PD-L2, PROM1, S152, SIRPalpha, SISP1, SLC, SPG64, ST2, STEAP1, STEAP2, Syk kinase, STEAP1, TROP2, TACI, TDO, TGFBETA, T14, TIGIT, TIM3, TLR, TLR2, TLR4, TLR5, TLR9, TMEF1, TNFa, TNFRSF7, Tp55, TREM1, TSLP, TSLPR, TWEAK, VEGF, VISTA, Vstm3, or WUCAM; VL4 is a fourth immunoglobulin light chain variable region that specifically binds to CD3; VH1 is a first immunoglobulin heavy chain variable region that specifically binds to A2AR, APRIL, ATPDase, BAFF, BAFFR, BCMA, BlyS, BTK, BTLA, B7DC, B7H1, B7H2, B7H3, B7H4, B7H5, B7H6, B7H7, B7RP1, B7-4, C3, C5, CCL2, CCL3, CCL4, CCL5, CCL7, CCL8, CCL11, CCL15, CCL17, CCL19, CCL20, CCL21, CCL25, CCR3, CCR4, CD16A, CD19, CD20, CD24, CD27, CD28, CD30, CD38, CD39, CD40, CD40L, CD47, CD52, CD70, CD80, CD86, CD123, CD133, CD137, CD137L, CD160, CD272, CEACAM5, CLEC9, CLEC91, CRTH2, CSF-1, CSF-2, CSF-3, CXCL1, CXCL2, CXCL4, CXCL12, CXCL13, CXCR3, cMet, CTLA4, DLL3, DLL4, DNGR-1, E-cadherin, EGFR, ENTPD1, EpCAM, FCER1, FCER1A, FCER2, FGFR, FLAP, FOLH1, Gi24, GITR, GITRL, GPR5, GP100, GPRC5D, HER2, HER3, ICOSL, ICOS, HHLA2, HMGB1, HVEM, IDO, IFNa, IgE, IGF1R, IL2Rbeta, IL1, ILIA, IL1B, IL1F10, IL2, IL4, IL4Ra, IL5, IL5R, IL6, IL7, IL7Ra, IL8, IL9, IL9R, IL10, rhILlO, IL12, IL13, IL13Ra1, IL13Ra2, IL15, IL17, IL17Rb, IL18, IL22, IL23, IL25, IL7, IL33, IL35, ITGB4, ITK, KIR, LAG3, LAMP1, leptin, LPFS2, MHC class II, MUC-1, MUC-16, NCR3LG1, NKG2D, NKp46, NTPDase-1, OX40, OX40L, PD-1, PD-L1, PD-L2, PROM1, S152, SIRPalpha, SISP1, SLC, SPG64, ST2, STEAP1, STEAP2, Syk kinase, STEAP1, TROP2, TACI, TDO, TGFBETA, T14, TIGIT, TIM3, TLR, TLR2, TLR4, TLR5, TLR9, TMEF1, TNFa, TNFRSF7, Tp55, TREM1, TSLP, TSLPR, TWEAK, VEGF, VISTA, Vstm3, or WUCAM; VH2 is a second immunoglobulin heavy chain variable region that specifically binds to A2AR, APRIL, ATPDase, BAFF, BAFFR, BCMA, BlyS, BTK, BTLA, B7DC, B7H1, B7H2, B7H3, B7H4, B7H5, B7H6, B7H7, B7RP1, B7-4, C3, C5, CCL2, CCL3, CCL4, CCL5, CCL7, CCL8, CCL11, CCL15, CCL17, CCL19, CCL20, CCL21, CCL25, CCR3, CCR4, CD16A, CD19, CD20, CD24, CD27, CD28, CD30, CD38, CD39, CD40, CD40L, CD47, CD52, CD70, CD80, CD86, CD123, CD133, CD137, CD137L, CD160, CD272, CEACAM5, CLEC9, CLEC91, CRTH2, CSF-1, CSF-2, CSF-3, CXCL1, CXCL2, CXCL4, CXCL12, CXCL13, CXCR3, cMet, CTLA4, DLL3, DLL4, DNGR-1, E-cadherin, EGFR, ENTPD1, EpCAM, FCER1, FCER1A, FCER2, FGFR, FLAP, FOLH1, Gi24, GITR, GITRL, GPR5, GP100, GPRC5D, HER2, HER3, ICOSL, ICOS, HHLA2, HMGB1, HVEM, IDO, IFNa, IgE, IGF1R, IL2Rbeta, IL1, ILIA, IL1B, IL1F10, IL2, IL4, IL4Ra, IL5, IL5R, IL6, IL7, IL7Ra, IL8, IL9, IL9R, IL10, rhILlO, IL12, IL13, IL13Ra1, IL13Ra2, IL15, IL17, IL17Rb, IL18, IL22, IL23, IL25, IL7, IL33, IL35, ITGB4, ITK, KIR, LAG3, LAMP1, leptin, LPFS2, MHC class II, MUC-1, MUC-16, NCR3LG1, NKG2D, NKp46, NTPDase-1, OX40, OX40L, PD-1, PD-L1, PD-L2, PROM1, S152, SIRPalpha, SISP1, SLC, SPG64, ST2, STEAP1, STEAP2, Syk kinase, STEAP1, TROP2, TACI, TDO, TGFBETA, T14, TIGIT, TIM3, TLR, TLR2, TLR4, TLR5, TLR9, TMEF1, TNFa, TNFRSF7, Tp55, TREM1, TSLP, TSLPR, TWEAK, VEGF, VISTA, Vstm3, or WUCAM; VH3 is a third immunoglobulin heavy chain variable region that specifically binds to A2AR, APRIL, ATPDase, BAFF, BAFFR, BCMA, BlyS, BTK, BTLA, B7DC, B7H1, B7H2, B7H3, B7H4, B7H5, B7H6, B7H7, B7RP1, B7-4, C3, C5, CCL2, CCL3, CCL4, CCL5, CCL7, CCL8, CCL11, CCL15, CCL17, CCL19, CCL20, CCL21, CCL25, CCR3, CCR4, CD16A, CD19, CD20, CD24, CD27, CD28, CD30, CD38, CD39, CD40, CD40L, CD47, CD52, CD70, CD80, CD86, CD123, CD133, CD137, CD137L, CD160, CD272, CEACAM5, CLEC9, CLEC91, CRTH2, CSF-1, CSF-2, CSF-3, CXCL1, CXCL2, CXCL4, CXCL12, CXCL13, CXCR3, cMet, CTLA4, DLL3, DLL4, DNGR-1, E-cadherin, EGFR, ENTPD1, EpCAM, FCER1, FCER1A, FCER2, FGFR, FLAP, FOLH1, Gi24, GITR, GITRL, GPR5, GP100, GPRC5D, HER2, HER3, ICOSL, ICOS, HHLA2, HMGB1, HVEM, IDO, IFNa, IgE, IGF1R, IL2Rbeta, IL1, ILIA, IL1B, IL1F10, IL2, IL4, IL4Ra, IL5, IL5R, IL6, IL7, IL7Ra, IL8, IL9, IL9R, IL10, rhILlO, IL12, IL13, IL13Ra1, IL13Ra2, IL15, IL17, IL17Rb, IL18, IL22, IL23, IL25, IL7, IL33, IL35, ITGB4, ITK, KIR, LAG3, LAMP1, leptin, LPFS2, MHC class II, MUC-1, MUC-16, NCR3LG1, NKG2D, NKp46, NTPDase-1, OX40, OX40L, PD-1, PD-L1, PD-L2, PROM1, S152, SIRPalpha, SISP1, SLC, SPG64, ST2, STEAP1, STEAP2, Syk kinase, STEAP1, TROP2, TACI, TDO, TGFBETA, T14, TIGIT, TIM3, TLR, TLR2, TLR4, TLR5, TLR9, TMEF1, TNFa, TNFRSF7, Tp55, TREM1, TSLP, TSLPR, TWEAK, VEGF, VISTA, Vstm3, or WUCAM; VH4 is a fourth immunoglobulin heavy chain variable region that specifically binds to CD3; Fc is a region comprising an immunoglobulin heavy chain constant region 2 (CH2), an immunoglobulin heavy chain constant region 3 (CH3), and optionally, an immunoglobulin hinge; CH1 is an immunoglobulin heavy chain constant region 1; CL is an immunoglobulin light chain constant region; and L1-L88 are amino acid linkers. In some aspects, the first polypeptide has a structure represented by VL1-L1-VL2-L2-VH2-L3-VH1-L4-CH1-L5-Fc; VH1-L6-VH2-L7-VL2-L8-VL1-L9-CH1-L10-Fc; VL1-L11-VL2-L12-VH2-L13-VH1-L14-CL-L15-Fc; VH1-L16-VH2-L17-VL2-L18-VL1-L19-CL-L20-Fc; VL1-L21-VL2-L22-VH2-L23-VH1-L24-CH1-L25-CL-L26-Fc; VH1-L27-VH2-L28-VL2-L29-VL1-L30-CH1-L31-CL-L32-Fc; VL1-L33-VL2-L34-VH2-L35-VH1-L36-CL-L37-CH1-L38-Fc; or VH1-L39-VH2-L40-VL2-L41-VL1-L42-CL-L43-CH1-L44-Fc and the second polypeptide has a structure represented by VL3-L45-VL4-L46-VH4-L47-VH3-L48-CH1-L49-Fc. In some aspects, the first polypeptide has a structure represented by VL1-L1-VL2-L2-VH2-L3-VH1-L4-CH1-L5-Fc; VH1-L6-VH2-L7-VL2-L8-VL1-L9-CH1-L10-Fc; VL1-L11-VL2-L12-VH2-L13-VH1-L14-CL-L15-Fc; VH1-L16-VH2-L17-VL2-L18-VL1-L19-CL-L20-Fc; VL1-L21-VL2-L22-VH2-L23-VH1-L24-CH1-L25-CL-L26-Fc; VH1-L27-VH2-L28-VL2-L29-VL1-L30-CH1-L31-CL-L32-Fc; VL1-L33-VL2-L34-VH2-L35-VH1-L36-CL-L37-CH1-L38-Fc; or VH1-L39-VH2-L40-VL2-L41-VL1-L42-CL-L43-CH1-L44-Fc and the second polypeptide has a structure represented by VH3-L50-VH4-L51-VL4-L52-VL3-L53-CH1-L54-Fc. In some aspects, the first polypeptide has a structure represented by VL1-L1-VL2-L2-VH2-L3-VH1-L4-CH1-L5-Fc; VH1-L6-VH2-L7-VL2-L8-VL1-L9-CH1-L10-Fc; VL1-L11-VL2-L12-VH2-L13-VH1-L14-CL-L15-Fc; VH1-L16-VH2-L17-VL2-L18-VL1-L19-CL-L20-Fc; VL1-L21-VL2-L22-VH2-L23-VH1-L24-CH1-L25-CL-L26-Fc; VH1-L27-VH2-L28-VL2-L29-VL1-L30-CH1-L31-CL-L32-Fc; VL1-L33-VL2-L34-VH2-L35-VH1-L36-CL-L37-CH1-L38-Fc; or VH1-L39-VH2-L40-VL2-L41-VL1-L42-CL-L43-CH1-L44-Fc and the second polypeptide has a structure represented by VL3-L55-VL4-L56-VH4-L57-VH3-L58-CL-L59-Fc. In some aspects, the first polypeptide has a structure represented by VL1-L1-VL2-L2-VH2-L3-VH1-L4-CH1-L5-Fc; VH1-L6-VH2-L7-VL2-L8-VL1-L9-CH1-L10-Fc; VL1-L11-VL2-L12-VH2-L13-VH1-L14-CL-L15-Fc; VH1-L16-VH2-L17-VL2-L18-VL1-L19-CL-L20-Fc; VL1-L21-VL2-L22-VH2-L23-VH1-L24-CH1-L25-CL-L26-Fc; VH1-L27-VH2-L28-VL2-L29-VL1-L30-CH1-L31-CL-L32-Fc; VL1-L33-VL2-L34-VH2-L35-VH1-L36-CL-L37-CH1-L38-Fc; or VH1-L39-VH2-L40-VL2-L41-VL1-L42-CL-L43-CH1-L44-Fc and the second polypeptide has a structure represented by VH3-L60-VH4-L61-VL4-L62-VL3-L63-CL-L64-Fc. In some aspects, the first polypeptide has a structure represented by VL1-L1-VL2-L2-VH2-L3-VH1-L4-CH1-L5-Fc; VH1-L6-VH2-L7-VL2-L8-VL1-L9-CH1-L10-Fc; VL1-L11-VL2-L12-VH2-L13-VH1-L14-CL-L15-Fc; VH1-L16-VH2-L17-VL2-L18-VL1-L19-CL-L20-Fc; VL1-L21-VL2-L22-VH2-L23-VH1-L24-CH1-L25-CL-L26-Fc; VH1-L27-VH2-L28-VL2-L29-VL1-L30-CH1-L31-CL-L32-Fc; VL1-L33-VL2-L34-VH2-L35-VH1-L36-CL-L37-CH1-L38-Fc; or VH1-L39-VH2-L40-VL2-L41-VL1-L42-CL-L43-CH1-L44-Fc and the second polypeptide has a structure represented by VL3-L65-VL4-L66-VH4-L67-VH3-L68-CH1-L69-CL-L70-Fc. In some aspects, the first polypeptide has a structure represented by VL1-L1-VL2-L2-VH2-L3-VH1-L4-CH1-L5-Fc; VH1-L6-VH2-L7-VL2-L8-VL1-L9-CH1-L10-Fc; VL1-L11-VL2-L12-VH2-L13-VH1-L14-CL-L15-Fc; VH1-L16-VH2-L17-VL2-L18-VL1-L19-CL-L20-Fc; VL1-L21-VL2-L22-VH2-L23-VH1-L24-CH1-L25-CL-L26-Fc; VH1-L27-VH2-L28-VL2-L29-VL1-L30-CH1-L31-CL-L32-Fc; VL1-L33-VL2-L34-VH2-L35-VH1-L36-CL-L37-CH1-L38-Fc; or VH1-L39-VH2-L40-VL2-L41-VL1-L42-CL-L43-CH1-L44-Fc and the second polypeptide has a structure represented by VH3-L71-VH4-L72-VL4-L73-VL3-L74-CH1-L75-CL-L76-Fc. In some aspects, the first polypeptide has a structure represented by VL1-L1-VL2-L2-VH2-L3-VH1-L4-CH1-L5-Fc; VH1-L6-VH2-L7-VL2-L8-VL1-L9-CH1-L10-Fc; VL1-L11-VL2-L12-VH2-L13-VH1-L14-CL-L15-Fc; VH1-L16-VH2-L17-VL2-L18-VL1-L19-CL-L20-Fc; VL1-L21-VL2-L22-VH2-L23-VH1-L24-CH1-L25-CL-L26-Fc; VH1-L27-VH2-L28-VL2-L29-VL1-L30-CH1-L31-CL-L32-Fc; VL1-L33-VL2-L34-VH2-L35-VH1-L36-CL-L37-CH1-L38-Fc; or VH1-L39-VH2-L40-VL2-L41-VL1-L42-CL-L43-CH1-L44-Fc and the second polypeptide has a structure represented by VL3-L77-VL4-L78-VH4-L79-VH3-L80-CL-L81-CH1-L82-Fc. In some aspects, the first polypeptide has a structure represented by VL1-L1-VL2-L2-VH2-L3-VH1-L4-CH1-L5-Fc; VH1-L6-VH2-L7-VL2-L8-VL1-L9-CH1-L10-Fc; VL1-L11-VL2-L12-VH2-L13-VH1-L14-CL-L15-Fc; VH1-L16-VH2-L17-VL2-L18-VL1-L19-CL-L20-Fc; VL1-L21-VL2-L22-VH2-L23-VH1-L24-CH1-L25-CL-L26-Fc; VH1-L27-VH2-L28-VL2-L29-VL1-L30-CH1-L31-CL-L32-Fc; VL1-L33-VL2-L34-VH2-L35-VH1-L36-CL-L37-CH1-L38-Fc; or VH1-L39-VH2-L40-VL2-L41-VL1-L42-CL-L43-CH1-L44-Fc and the second polypeptide has a structure represented by VH3-L83-VH4-L84-VL4-L85-VL3-L86-CL-L87-CH1-L88-Fc. In some aspects, VL1 and VH1 may specifically bind to A2AR, APRIL, ATPDase, BAFF, BAFFR, BCMA, BlyS, BTK, BTLA, B7DC, B7H1, B7H2, B7H3, B7H4, B7H5, B7H6, B7H7, B7RP1, B7-4, C3, C5, CCL2, CCL3, CCL4, CCL5, CCL7, CCL8, CCL11, CCL15, CCL17, CCL19, CCL20, CCL21, CCL25, CCR3, CCR4, CD16A, CD19, CD20, CD24, CD27, CD28, CD30, CD38, CD39, CD40, CD40L, CD47, CD52, CD70, CD80, CD86, CD123, CD133, CD137, CD137L, CD160, CD272, CEACAM5, CLEC9, CLEC91, CRTH2, CSF-1, CSF-2, CSF-3, CXCL1, CXCL2, CXCL4, CXCL12, CXCL13, CXCR3, cMet, CTLA4, DLL3, DLL4, DNGR-1, E-cadherin, EGFR, ENTPD1, EpCAM, FCER1, FCER1A, FCER2, FGFR, FLAP, FOLH1, Gi24, GITR, GITRL, GPR5, GP100, GPRC5D, HER2, HER3, ICOSL, ICOS, HHLA2, HMGB1, HVEM, IDO, IFNa, IgE, IGF1R, IL2Rbeta, IL1, ILIA, IL1B, IL1F10, IL2, IL4, IL4Ra, IL5, IL5R, IL6, IL7, IL7Ra, IL8, IL9, IL9R, IL10, rhILlO, IL12, IL13, IL13Ra1, IL13Ra2, IL15, IL17, IL17Rb, IL18, IL22, IL23, IL25, IL7, IL33, IL35, ITGB4, ITK, KIR, LAG3, LAMP1, leptin, LPFS2, MHC class II, MUC-1, MUC-16, NCR3LG1, NKG2D, NKp46, NTPDase-1, OX40, OX40L, PD-1, PD-L1, PD-L2, PROM1, S152, SIRPalpha, SISP1, SLC, SPG64, ST2, STEAP1, STEAP2, Syk kinase, STEAP1, TROP2, TACI, TDO, TGFBETA, T14, TIGIT, TIM3, TLR, TLR2, TLR4, TLR5, TLR9, TMEF1, TNFa, TNFRSF7, Tp55, TREM1, TSLP, TSLPR, TWEAK, VEGF, VISTA, Vstm3, or WUCAM. In some aspects, VL2 and VH2 may specifically bind to A2AR, APRIL, ATPDase, BAFF, BAFFR, BCMA, BlyS, BTK, BTLA, B7DC, B7H1, B7H2, B7H3, B7H4, B7H5, B7H6, B7H7, B7RP1, B7-4, C3, C5, CCL2, CCL3, CCL4, CCL5, CCL7, CCL8, CCL11, CCL15, CCL17, CCL19, CCL20, CCL21, CCL25, CCR3, CCR4, CD16A, CD19, CD20, CD24, CD27, CD28, CD30, CD38, CD39, CD40, CD40L, CD47, CD52, CD70, CD80, CD86, CD123, CD133, CD137, CD137L, CD160, CD272, CEACAM5, CLEC9, CLEC91, CRTH2, CSF-1, CSF-2, CSF-3, CXCL1, CXCL2, CXCL4, CXCL12, CXCL13, CXCR3, cMet, CTLA4, DLL3, DLL4, DNGR-1, E-cadherin, EGFR, ENTPD1, EpCAM, FCER1, FCER1A, FCER2, FGFR, FLAP, FOLH1, Gi24, GITR, GITRL, GPR5, GP100, GPRC5D, HER2, HER3, ICOSL, ICOS, HHLA2, HMGB1, HVEM, IDO, IFNa, IgE, IGF1R, IL2Rbeta, IL1, ILIA, IL1B, IL1F10, IL2, IL4, IL4Ra, IL5, IL5R, IL6, IL7, IL7Ra, IL8, IL9, IL9R, IL10, rhILlO, IL12, IL13, IL13Ra1, IL13Ra2, IL15, IL17, IL17Rb, IL18, IL22, IL23, IL25, IL7, IL33, IL35, ITGB4, ITK, KIR, LAG3, LAMP1, leptin, LPFS2, MHC class II, MUC-1, MUC-16, NCR3LG1, NKG2D, NKp46, NTPDase-1, OX40, OX40L, PD-1, PD-L1, PD-L2, PROM1, S152, SIRPalpha, SISP1, SLC, SPG64, ST2, STEAP1, STEAP2, Syk kinase, STEAP1, TROP2, TACI, TDO, TGFBETA, T14, TIGIT, TIM3, TLR, TLR2, TLR4, TLR5, TLR9, TMEF1, TNFa, TNFRSF7, Tp55, TREM1, TSLP, TSLPR, TWEAK, VEGF, VISTA, Vstm3, or WUCAM. In some aspects, VL3 and VH3 may specifically bind to A2AR, APRIL, ATPDase, BAFF, BAFFR, BCMA, BlyS, BTK, BTLA, B7DC, B7H1, B7H2, B7H3, B7H4, B7H5, B7H6, B7H7, B7RP1, B7-4, C3, C5, CCL2, CCL3, CCL4, CCL5, CCL7, CCL8, CCL11, CCL15, CCL17, CCL19, CCL20, CCL21, CCL25, CCR3, CCR4, CD16A, CD19, CD20, CD24, CD27, CD28, CD30, CD38, CD39, CD40, CD40L, CD47, CD52, CD70, CD80, CD86, CD123, CD133, CD137, CD137L, CD160, CD272, CEACAM5, CLEC9, CLEC91, CRTH2, CSF-1, CSF-2, CSF-3, CXCL1, CXCL2, CXCL4, CXCL12, CXCL13, CXCR3, cMet, CTLA4, DLL3, DLL4, DNGR-1, E-cadherin, EGFR, ENTPD1, EpCAM, FCER1, FCER1A, FCER2, FGFR, FLAP, FOLH1, Gi24, GITR, GITRL, GPR5, GP100, GPRC5D, HER2, HER3, ICOSL, ICOS, HHLA2, HMGB1, HVEM, IDO, IFNa, IgE, IGF1R, IL2Rbeta, IL1, ILIA, IL1B, IL1F10, IL2, IL4, IL4Ra, IL5, IL5R, IL6, IL7, IL7Ra, IL8, IL9, IL9R, IL10, rhILlO, IL12, IL13, IL13Ra1, IL13Ra2, IL15, IL17, IL17Rb, IL18, IL22, IL23, IL25, IL7, IL33, IL35, ITGB4, ITK, KIR, LAG3, LAMP1, leptin, LPFS2, MHC class II, MUC-1, MUC-16, NCR3LG1, NKG2D, NKp46, NTPDase-1, OX40, OX40L, PD-1, PD-L1, PD-L2, PROM1, S152, SIRPalpha, SISP1, SLC, SPG64, ST2, STEAP1, STEAP2, Syk kinase, STEAP1, TROP2, TACI, TDO, TGFBETA, T14, TIGIT, TIM3, TLR, TLR2, TLR4, TLR5, TLR9, TMEF1, TNFa, TNFRSF7, Tp55, TREM1, TSLP, TSLPR, TWEAK, VEGF, VISTA, Vstm3, or WUCAM. The VL1, VL2, VL3, VH1, VH2, and/or VH3 may specifically bind to CD28, cMet, Trop2, CD20, or CD19; and VL4 and/or VH4 may specifically bind to CD3. For example, the antigen binding polypeptide complex may specifically bind CD28, CD3, cMet, and Trop2. For example, the antigen binding polypeptide complex may specifically bind CD28, CD3, CD19, and CD20. For example, VL1 and VH1 may specifically bind to CD28. For example, VL2 and VH2 may specifically bind to CD28. For example, VL3 and VH3 may specifically bind to CD28. For example, VL1 and VH1 may specifically bind to cMet. For example, VL2 and VH2 may specifically bind to cMet. For example, VL3 and VH3 may specifically bind to cMet. For example, VL1 and VH1 may specifically bind to Trop2. For example, VL2 and VH2 may specifically bind to Trop2. For example, VL3 and VH3 may specifically bind to Trop2. For example, VL1 and VH1 may specifically bind to CD19. For example, VL2 and VH2 may specifically bind to CD19. For example, VL3 and VH3 may specifically bind to CD19. For example, VL1 and VH1 may specifically bind to CD20. For example, VL2 and VH2 may specifically bind to CD20. For example, VL3 and VH3 may specifically bind to CD20.

[0197] In some aspects, the invention is directed to an antigen binding polypeptide complex comprising a first polypeptide and a second polypeptide; wherein the first polypeptide has a structure represented by VL1-L1-VL2-L2-VH2-L3-VH1-L4-CH1-L5-Fc; VH1-L6-VH2-L7-VL2-L8-VL1-L9-CH1-L10-Fc; VL1-L11-VL2-L12-VH2-L13-VH1-L14-CL-L15-Fc; VH1-L16-VH2-L17-VL2-L18-VL1-L19-CL-L20-Fc; VL1-L21-VL2-L22-VH2-L23-VH1-L24-CH1-L25-CL-L26-Fc; VH1-L27-VH2-L28-VL2-L29-VL1-L30-CH1-L31-CL-L32-Fc; VL1-L33-VL2-L34-VH2-L35-VH1-L36-CL-L37-CH1-L38-Fc; or VH1-L39-VH2-L40-VL2-L41-VL1-L42-CL-L43-CH1-L44-Fc; wherein the second polypeptide has a structure represented by VL3-L45-VL4-L46-VH4-L47-VH3-L48-CH1-L49-Fc; VH3-L50-VH4-L51-VL4-L52-VL3-L53-CH1-L54-Fc; VL3-L55-VL4-L56-VH4-L57-VH3-L58-CL-L59-Fc; VH3-L60-VH4-L61-VL4-L62-VL3-L63-CL-L64-Fc; VL3-L65-VL4-L66-VH4-L67-VH3-L68-CH1-L69-CL-L70-Fc; VH3-L71-VH4-L72-VL4-L73-VL3-L74-CH1-L75-CL-L76-Fc; VL3-L77-VL4-L78-VH4-L79-VH3-L80-CL-L81-CH1-L82-Fc; or VH3-L83-VH4-L84-VL4-L85-VL3-L86-CL-L87-CH1-L88-Fc; wherein VL1 is a first immunoglobulin light chain variable region that specifically binds to CD28; VL2 is a second immunoglobulin light chain variable region that specifically binds to A2AR, APRIL, ATPDase, BAFF, BAFFR, BCMA, BlyS, BTK, BTLA, B7DC, B7H1, B7H2, B7H3, B7H4, B7H5, B7H6, B7H7, B7RP1, B7-4, C3, C5, CCL2, CCL3, CCL4, CCL5, CCL7, CCL8, CCL11, CCL15, CCL17, CCL19, CCL20, CCL21, CCL25, CCR3, CCR4, CD16A, CD19, CD20, CD24, CD27, CD28, CD30, CD38, CD39, CD40, CD40L, CD47, CD52, CD70, CD80, CD86, CD123, CD133, CD137, CD137L, CD160, CD272, CEACAM5, CLEC9, CLEC91, CRTH2, CSF-1, CSF-2, CSF-3, CXCL1, CXCL2, CXCL4, CXCL12, CXCL13, CXCR3, cMet, CTLA4, DLL3, DLL4, DNGR-1, E-cadherin, EGFR, ENTPD1, EpCAM, FCER1, FCER1A, FCER2, FGFR, FLAP, FOLH1, Gi24, GITR, GITRL, GPR5, GP100, GPRC5D, HER2, HER3, ICOSL, ICOS, HHLA2, HMGB1, HVEM, IDO, IFNa, IgE, IGF1R, IL2Rbeta, IL1, ILIA, IL1B, IL1F10, IL2, IL4, IL4Ra, IL5, IL5R, IL6, IL7, IL7Ra, IL8, IL9, IL9R, IL10, rhILlO, IL12, IL13, IL13Ra1, IL13Ra2, IL15, IL17, IL17Rb, IL18, IL22, IL23, IL25, IL7, IL33, IL35, ITGB4, ITK, KIR, LAG3, LAMP1, leptin, LPFS2, MHC class II, MUC-1, MUC-16, NCR3LG1, NKG2D, NKp46, NTPDase-1, OX40, OX40L, PD-1, PD-L1, PD-L2, PROM1, S152, SIRPalpha, SISP1, SLC, SPG64, ST2, STEAP1, STEAP2, Syk kinase, STEAP1, TROP2, TACI, TDO, TGFBETA, T14, TIGIT, TIM3, TLR, TLR2, TLR4, TLR5, TLR9, TMEF1, TNFa, TNFRSF7, Tp55, TREM1, TSLP, TSLPR, TWEAK, VEGF, VISTA, Vstm3, or WUCAM; VL3 is a third immunoglobulin light chain variable region that specifically binds to A2AR, APRIL, ATPDase, BAFF, BAFFR, BCMA, BlyS, BTK, BTLA, B7DC, B7H1, B7H2, B7H3, B7H4, B7H5, B7H6, B7H7, B7RP1, B7-4, C3, C5, CCL2, CCL3, CCL4, CCL5, CCL7, CCL8, CCL11, CCL15, CCL17, CCL19, CCL20, CCL21, CCL25, CCR3, CCR4, CD16A, CD19, CD20, CD24, CD27, CD28, CD30, CD38, CD39, CD40, CD40L, CD47, CD52, CD70, CD80, CD86, CD123, CD133, CD137, CD137L, CD160, CD272, CEACAM5, CLEC9, CLEC91, CRTH2, CSF-1, CSF-2, CSF-3, CXCL1, CXCL2, CXCL4, CXCL12, CXCL13, CXCR3, cMet, CTLA4, DLL3, DLL4, DNGR-1, E-cadherin, EGFR, ENTPD1, EpCAM, FCER1, FCER1A, FCER2, FGFR, FLAP, FOLH1, Gi24, GITR, GITRL, GPR5, GP100, GPRC5D, HER2, HER3, ICOSL, ICOS, HHLA2, HMGB1, HVEM, IDO, IFNa, IgE, IGF1R, IL2Rbeta, IL1, ILIA, IL1B, IL1F10, IL2, IL4, IL4Ra, IL5, IL5R, IL6, IL7, IL7Ra, IL8, IL9, IL9R, IL10, rhILlO, IL12, IL13, IL13Ra1, IL13Ra2, IL15, IL17, IL17Rb, IL18, IL22, IL23, IL25, IL7, IL33, IL35, ITGB4, ITK, KIR, LAG3, LAMP1, leptin, LPFS2, MHC class II, MUC-1, MUC-16, NCR3LG1, NKG2D, NKp46, NTPDase-1, OX40, OX40L, PD-1, PD-L1, PD-L2, PROM1, S152, SIRPalpha, SISP1, SLC, SPG64, ST2, STEAP1, STEAP2, Syk kinase, STEAP1, TROP2, TACI, TDO, TGFBETA, T14, TIGIT, TIM3, TLR, TLR2, TLR4, TLR5, TLR9, TMEF1, TNFa, TNFRSF7, Tp55, TREM1, TSLP, TSLPR, TWEAK, VEGF, VISTA, Vstm3, or WUCAM; VL4 is a fourth immunoglobulin light chain variable region that specifically binds to CD3; VH1 is a first immunoglobulin heavy chain variable region that specifically binds to CD28; VH2 is a second immunoglobulin heavy chain variable region that specifically binds to A2AR, APRIL, ATPDase, BAFF, BAFFR, BCMA, BlyS, BTK, BTLA, B7DC, B7H1, B7H2, B7H3, B7H4, B7H5, B7H6, B7H7, B7RP1, B7-4, C3, C5, CCL2, CCL3, CCL4, CCL5, CCL7, CCL8, CCL11, CCL15, CCL17, CCL19, CCL20, CCL21, CCL25, CCR3, CCR4, CD16A, CD19, CD20, CD24, CD27, CD28, CD30, CD38, CD39, CD40, CD40L, CD47, CD52, CD70, CD80, CD86, CD123, CD133, CD137, CD137L, CD160, CD272, CEACAM5, CLEC9, CLEC91, CRTH2, CSF-1, CSF-2, CSF-3, CXCL1, CXCL2, CXCL4, CXCL12, CXCL13, CXCR3, cMet, CTLA4, DLL3, DLL4, DNGR-1, E-cadherin, EGFR, ENTPD1, EpCAM, FCER1, FCER1A, FCER2, FGFR, FLAP, FOLH1, Gi24, GITR, GITRL, GPR5, GP100, GPRC5D, HER2, HER3, ICOSL, ICOS, HHLA2, HMGB1, HVEM, IDO, IFNa, IgE, IGF1R, IL2Rbeta, IL1, ILIA, IL1B, IL1F10, IL2, IL4, IL4Ra, IL5, IL5R, IL6, IL7, IL7Ra, IL8, IL9, IL9R, IL10, rhILlO, IL12, IL13, IL13Ra1, IL13Ra2, IL15, IL17, IL17Rb, IL18, IL22, IL23, IL25, IL7, IL33, IL35, ITGB4, ITK, KIR, LAG3, LAMP1, leptin, LPFS2, MHC class II, MUC-1, MUC-16, NCR3LG1, NKG2D, NKp46, NTPDase-1, OX40, OX40L, PD-1, PD-L1, PD-L2, PROM1, S152, SIRPalpha, SISP1, SLC, SPG64, ST2, STEAP1, STEAP2, Syk kinase, STEAP1, TROP2, TACI, TDO, TGFBETA, T14, TIGIT, TIM3, TLR, TLR2, TLR4, TLR5, TLR9, TMEF1, TNFa, TNFRSF7, Tp55, TREM1, TSLP, TSLPR, TWEAK, VEGF, VISTA, Vstm3, or WUCAM; VH3 is a third immunoglobulin heavy chain variable region that specifically binds to A2AR, APRIL, ATPDase, BAFF, BAFFR, BCMA, BlyS, BTK, BTLA, B7DC, B7H1, B7H2, B7H3, B7H4, B7H5, B7H6, B7H7, B7RP1, B7-4, C3, C5, CCL2, CCL3, CCL4, CCL5, CCL7, CCL8, CCL11, CCL15, CCL17, CCL19, CCL20, CCL21, CCL25, CCR3, CCR4, CD16A, CD19, CD20, CD24, CD27, CD28, CD30, CD38, CD39, CD40, CD40L, CD47, CD52, CD70, CD80, CD86, CD123, CD133, CD137, CD137L, CD160, CD272, CEACAM5, CLEC9, CLEC91, CRTH2, CSF-1, CSF-2, CSF-3, CXCL1, CXCL2, CXCL4, CXCL12, CXCL13, CXCR3, cMet, CTLA4, DLL3, DLL4, DNGR-1, E-cadherin, EGFR, ENTPD1, EpCAM, FCER1, FCER1A, FCER2, FGFR, FLAP, FOLH1, Gi24, GITR, GITRL, GPR5, GP100, GPRC5D, HER2, HER3, ICOSL, ICOS, HHLA2, HMGB1, HVEM, IDO, IFNa, IgE, IGF1R, IL2Rbeta, IL1, ILIA, IL1B, IL1F10, IL2, IL4, IL4Ra, IL5, IL5R, IL6, IL7, IL7Ra, IL8, IL9, IL9R, IL10, rhILlO, IL12, IL13, IL13Ra1, IL13Ra2, IL15, IL17, IL17Rb, IL18, IL22, IL23, IL25, IL7, IL33, IL35, ITGB4, ITK, KIR, LAG3, LAMP1, leptin, LPFS2, MHC class II, MUC-1, MUC-16, NCR3LG1, NKG2D, NKp46, NTPDase-1, OX40, OX40L, PD-1, PD-L1, PD-L2, PROM1, S152, SIRPalpha, SISP1, SLC, SPG64, ST2, STEAP1, STEAP2, Syk kinase, STEAP1, TROP2, TACI, TDO, TGFBETA, T14, TIGIT, TIM3, TLR, TLR2, TLR4, TLR5, TLR9, TMEF1, TNFa, TNFRSF7, Tp55, TREM1, TSLP, TSLPR, TWEAK, VEGF, VISTA, Vstm3, or WUCAM; VH4 is a fourth immunoglobulin heavy chain variable region that specifically binds to CD3; Fe is a region comprising an immunoglobulin heavy chain constant region 2 (CH2), an immunoglobulin heavy chain constant region 3 (CH3), and optionally, an immunoglobulin hinge; CH1 is an immunoglobulin heavy chain constant region 1; CL is an immunoglobulin light chain constant region; and L1-L88 are amino acid linkers. In some aspects, the first polypeptide has a structure represented by VL1-L1-VL2-L2-VH2-L3-VH1-L4-CH1-L5-Fc; VH1-L6-VH2-L7-VL2-L8-VL1-L9-CH1-L10-Fc; VL1-L11-VL2-L12-VH2-L13-VH1-L14-CL-L15-Fc; VH1-L16-VH2-L17-VL2-L18-VL1-L19-CL-L20-Fc; VL1-L21-VL2-L22-VH2-L23-VH1-L24-CH1-L25-CL-L26-Fc; VH1-L27-VH2-L28-VL2-L29-VL1-L30-CH1-L31-CL-L32-Fc; VL1-L33-VL2-L34-VH2-L35-VH1-L36-CL-L37-CH1-L38-Fc; or VH1-L39-VH2-L40-VL2-L41-VL1-L42-CL-L43-CH1-L44-Fc and the second polypeptide has a structure represented by VL3-L45-VL4-L46-VH4-L47-VH3-L48-CH1-L49-Fc. In some aspects, the first polypeptide has a structure represented by VL1-L1-VL2-L2-VH2-L3-VH1-L4-CH1-L5-Fc; VH1-L6-VH2-L7-VL2-L8-VL1-L9-CH1-L10-Fc; VL1-L11-VL2-L12-VH2-L13-VH1-L14-CL-L15-Fc; VH1-L16-VH2-L17-VL2-L18-VL1-L19-CL-L20-Fc; VL1-L21-VL2-L22-VH2-L23-VH1-L24-CH1-L25-CL-L26-Fc; VH1-L27-VH2-L28-VL2-L29-VL1-L30-CH1-L31-CL-L32-Fc; VL1-L33-VL2-L34-VH2-L35-VH1-L36-CL-L37-CH1-L38-Fc; or VH1-L39-VH2-L40-VL2-L41-VL1-L42-CL-L43-CH1-L44-Fc and the second polypeptide has a structure represented by VH3-L50-VH4-L51-VL4-L52-VL3-L53-CH1-L54-Fc. In some aspects, the first polypeptide has a structure represented by VL1-L1-VL2-L2-VH2-L3-VH1-L4-CH1-L5-Fc; VH1-L6-VH2-L7-VL2-L8-VL1-L9-CH1-L10-Fc; VL1-L11-VL2-L12-VH2-L13-VH1-L14-CL-L15-Fc; VH1-L16-VH2-L17-VL2-L18-VL1-L19-CL-L20-Fc; VL1-L21-VL2-L22-VH2-L23-VH1-L24-CH1-L25-CL-L26-Fc; VH1-L27-VH2-L28-VL2-L29-VL1-L30-CH1-L31-CL-L32-Fc; VL1-L33-VL2-L34-VH2-L35-VH1-L36-CL-L37-CH1-L38-Fc; or VH1-L39-VH2-L40-VL2-L41-VL1-L42-CL-L43-CH1-L44-Fc and the second polypeptide has a structure represented by VL3-L55-VL4-L56-VH4-L57-VH3-L58-CL-L59-Fc. In some aspects, the first polypeptide has a structure represented by VL1-L1-VL2-L2-VH2-L3-VH1-L4-CH1-L5-Fc; VH1-L6-VH2-L7-VL2-L8-VL1-L9-CH1-L10-Fc; VL1-L11-VL2-L12-VH2-L13-VH1-L14-CL-L15-Fc; VH1-L16-VH2-L17-VL2-L18-VL1-L19-CL-L20-Fc; VL1-L21-VL2-L22-VH2-L23-VH1-L24-CH1-L25-CL-L26-Fc; VH1-L27-VH2-L28-VL2-L29-VL1-L30-CH1-L31-CL-L32-Fc; VL1-L33-VL2-L34-VH2-L35-VH1-L36-CL-L37-CH1-L38-Fc; or VH1-L39-VH2-L40-VL2-L41-VL1-L42-CL-L43-CH1-L44-Fc and the second polypeptide has a structure represented by VH3-L60-VH4-L61-VL4-L62-VL3-L63-CL-L64-Fc. In some aspects, the first polypeptide has a structure represented by VL1-L1-VL2-L2-VH2-L3-VH1-L4-CH1-L5-Fc; VH1-L6-VH2-L7-VL2-L8-VL1-L9-CH1-L10-Fc; VL1-L11-VL2-L12-VH2-L13-VH1-L14-CL-L15-Fc; VH1-L16-VH2-L17-VL2-L18-VL1-L19-CL-L20-Fc; VL1-L21-VL2-L22-VH2-L23-VH1-L24-CH1-L25-CL-L26-Fc; VH1-L27-VH2-L28-VL2-L29-VL1-L30-CH1-L31-CL-L32-Fc; VL1-L33-VL2-L34-VH2-L35-VH1-L36-CL-L37-CH1-L38-Fc; or VH1-L39-VH2-L40-VL2-L41-VL1-L42-CL-L43-CH1-L44-Fc and the second polypeptide has a structure represented by VL3-L65-VL4-L66-VH4-L67-VH3-L68-CH1-L69-CL-L70-Fc. In some aspects, the first polypeptide has a structure represented by VL1-L1-VL2-L2-VH2-L3-VH1-L4-CH1-L5-Fc; VH1-L6-VH2-L7-VL2-L8-VL1-L9-CH1-L10-Fc; VL1-L11-VL2-L12-VH2-L13-VH1-L14-CL-L15-Fc; VH1-L16-VH2-L17-VL2-L18-VL1-L19-CL-L20-Fc; VL1-L21-VL2-L22-VH2-L23-VH1-L24-CH1-L25-CL-L26-Fc; VH1-L27-VH2-L28-VL2-L29-VL1-L30-CH1-L31-CL-L32-Fc; VL1-L33-VL2-L34-VH2-L35-VH1-L36-CL-L37-CH1-L38-Fc; or VH1-L39-VH2-L40-VL2-L41-VL1-L42-CL-L43-CH1-L44-Fc and the second polypeptide has a structure represented by VH3-L71-VH4-L72-VL4-L73-VL3-L74-CH1-L75-CL-L76-Fc. In some aspects, the first polypeptide has a structure represented by VL1-L1-VL2-L2-VH2-L3-VH1-L4-CH1-L5-Fc; VH1-L6-VH2-L7-VL2-L8-VL1-L9-CH1-L10-Fc; VL1-L11-VL2-L12-VH2-L13-VH1-L14-CL-L15-Fc; VH1-L16-VH2-L17-VL2-L18-VL1-L19-CL-L20-Fc; VL1-L21-VL2-L22-VH2-L23-VH1-L24-CH1-L25-CL-L26-Fc; VH1-L27-VH2-L28-VL2-L29-VL1-L30-CH1-L31-CL-L32-Fc; VL1-L33-VL2-L34-VH2-L35-VH1-L36-CL-L37-CH1-L38-Fc; or VH1-L39-VH2-L40-VL2-L41-VL1-L42-CL-L43-CH1-L44-Fc and the second polypeptide has a structure represented by VL3-L77-VL4-L78-VH4-L79-VH3-L80-CL-L81-CH1-L82-Fc. In some aspects, the first polypeptide has a structure represented by VL1-L1-VL2-L2-VH2-L3-VH1-L4-CH1-L5-Fc; VH1-L6-VH2-L7-VL2-L8-VL1-L9-CH1-L10-Fc; VL1-L11-VL2-L12-VH2-L13-VH1-L14-CL-L15-Fc; VH1-L16-VH2-L17-VL2-L18-VL1-L19-CL-L20-Fc; VL1-L21-VL2-L22-VH2-L23-VH1-L24-CH1-L25-CL-L26-Fc; VH1-L27-VH2-L28-VL2-L29-VL1-L30-CH1-L31-CL-L32-Fc; VL1-L33-VL2-L34-VH2-L35-VH1-L36-CL-L37-CH1-L38-Fc; or VH1-L39-VH2-L40-VL2-L41-VL1-L42-CL-L43-CH1-L44-Fc and the second polypeptide has a structure represented by VH3-L83-VH4-L84-VL4-L85-VL3-L86-CL-L87-CH1-L88-Fc. In some aspects, VL2 and VH2 specifically bind to A2AR, APRIL, ATPDase, BAFF, BAFFR, BCMA, BlyS, BTK, BTLA, B7DC, B7H1, B7H2, B7H3, B7H4, B7H5, B7H6, B7H7, B7RP1, B7-4, C3, C5, CCL2, CCL3, CCL4, CCL5, CCL7, CCL8, CCL11, CCL15, CCL17, CCL19, CCL20, CCL21, CCL25, CCR3, CCR4, CD16A, CD19, CD20, CD24, CD27, CD28, CD30, CD38, CD39, CD40, CD40L, CD47, CD52, CD70, CD80, CD86, CD123, CD133, CD137, CD137L, CD160, CD272, CEACAM5, CLEC9, CLEC91, CRTH2, CSF-1, CSF-2, CSF-3, CXCL1, CXCL2, CXCL4, CXCL12, CXCL13, CXCR3, cMet, CTLA4, DLL3, DLL4, DNGR-1, E-cadherin, EGFR, ENTPD1, EpCAM, FCER1, FCER1A, FCER2, FGFR, FLAP, FOLH1, Gi24, GITR, GITRL, GPR5, GP100, GPRC5D, HER2, HER3, ICOSL, ICOS, HHLA2, HMGB1, HVEM, IDO, IFNa, IgE, IGF1R, IL2Rbeta, IL1, ILIA, IL1B, IL1F10, IL2, IL4, IL4Ra, IL5, IL5R, IL6, IL7, IL7Ra, IL8, IL9, IL9R, IL10, rhILlO, IL12, IL13, IL13Ra1, IL13Ra2, IL15, IL17, IL17Rb, IL18, IL22, IL23, IL25, IL7, IL33, IL35, ITGB4, ITK, KIR, LAG3, LAMP1, leptin, LPFS2, MHC class II, MUC-1, MUC-16, NCR3LG1, NKG2D, NKp46, NTPDase-1, OX40, OX40L, PD-1, PD-L1, PD-L2, PROM1, S152, SIRPalpha, SISP1, SLC, SPG64, ST2, STEAP1, STEAP2, Syk kinase, STEAP1, TROP2, TACI, TDO, TGFBETA, T14, TIGIT, TIM3, TLR, TLR2, TLR4, TLR5, TLR9, TMEF1, TNFa, TNFRSF7, Tp55, TREM1, TSLP, TSLPR, TWEAK, VEGF, VISTA, Vstm3, or WUCAM. In some aspects, VL3 and VH3 specifically bind to A2AR, APRIL, ATPDase, BAFF, BAFFR, BCMA, BlyS, BTK, BTLA, B7DC, B7H1, B7H2, B7H3, B7H4, B7H5, B7H6, B7H7, B7RP1, B7-4, C3, C5, CCL2, CCL3, CCL4, CCL5, CCL7, CCL8, CCL11, CCL15, CCL17, CCL19, CCL20, CCL21, CCL25, CCR3, CCR4, CD16A, CD19, CD20, CD24, CD27, CD28, CD30, CD38, CD39, CD40, CD40L, CD47, CD52, CD70, CD80, CD86, CD123, CD133, CD137, CD137L, CD160, CD272, CEACAM5, CLEC9, CLEC91, CRTH2, CSF-1, CSF-2, CSF-3, CXCL1, CXCL2, CXCL4, CXCL12, CXCL13, CXCR3, cMet, CTLA4, DLL3, DLL4, DNGR-1, E-cadherin, EGFR, ENTPD1, EpCAM, FCER1, FCER1A, FCER2, FGFR, FLAP, FOLH1, Gi24, GITR, GITRL, GPR5, GP100, GPRC5D, HER2, HER3, ICOSL, ICOS, HHLA2, HMGB1, HVEM, IDO, IFNa, IgE, IGF1R, IL2Rbeta, IL1, ILIA, IL1B, IL1F10, IL2, IL4, IL4Ra, IL5, IL5R, IL6, IL7, IL7Ra, IL8, IL9, IL9R, IL10, rhILlO, IL12, IL13, IL13Ra1, IL13Ra2, IL15, IL17, IL17Rb, IL18, IL22, IL23, IL25, IL7, IL33, IL35, ITGB4, ITK, KIR, LAG3, LAMP1, leptin, LPFS2, MHC class II, MUC-1, MUC-16, NCR3LG1, NKG2D, NKp46, NTPDase-1, OX40, OX40L, PD-1, PD-L1, PD-L2, PROM1, S152, SIRPalpha, SISP1, SLC, SPG64, ST2, STEAP1, STEAP2, Syk kinase, STEAP1, TROP2, TACI, TDO, TGFBETA, T14, TIGIT, TIM3, TLR, TLR2, TLR4, TLR5, TLR9, TMEF1, TNFa, TNFRSF7, Tp55, TREM1, TSLP, TSLPR, TWEAK, VEGF, VISTA, Vstm3, or WUCAM. The VL2, VL3, VH2, and/or VH3 may specifically bind to CD28, cMet, Trop2, CD20, or CD19; VL1 and/or VH1 may specifically bind to CD28; and VL3 and/or VH3 may specifically bind to CD3. For example, the antigen binding polypeptide complex may specifically bind CD28, CD3, cMet, and Trop2. For example, the antigen binding polypeptide complex may specifically bind CD28, CD3, CD19, and CD20. For example, VL2 and VH2 may specifically bind to cMet. For example, VL3 and VH3 may specifically bind to cMet. For example, VL2 and VH2 may specifically bind to Trop2. For example, VL3 and VH3 may specifically bind to Trop2. For example, VL2 and VH2 may specifically bind to CD19. For example, VL3 and VH3 may specifically bind to CD19. For example, VL2 and VH2 may specifically bind to CD20. For example, VL3 and VH3 may specifically bind to CD20.

[0198] In some aspects, the invention is directed to an antigen binding polypeptide complex comprising a first polypeptide and a second polypeptide; wherein the first polypeptide has a structure represented by VL1-L1-VL2-L2-VH2-L3-VH1-L4-CH1-L5-Fc; VH1-L6-VH2-L7-VL2-L8-VL1-L9-CH1-L10-Fc; VL1-L11-VL2-L12-VH2-L13-VH1-L14-CL-L15-Fc; VH1-L16-VH2-L17-VL2-L18-VL1-L19-CL-L20-Fc; VL1-L21-VL2-L22-VH2-L23-VH1-L24-CH1-L25-CL-L26-Fc; VH1-L27-VH2-L28-VL2-L29-VL1-L30-CH1-L31-CL-L32-Fc; VL1-L33-VL2-L34-VH2-L35-VH1-L36-CL-L37-CH1-L38-Fc; or VH1-L39-VH2-L40-VL2-L41-VL1-L42-CL-L43-CH1-L44-Fc; wherein the second polypeptide has a structure represented by VL3-L45-VL4-L46-VH4-L47-VH3-L48-CH1-L49-Fc; VH3-L50-VH4-L51-VL4-L52-VL3-L53-CH1-L54-Fc; VL3-L55-VL4-L56-VH4-L57-VH3-L58-CL-L59-Fc; VH3-L60-VH4-L61-VL4-L62-VL3-L63-CL-L64-Fc; VL3-L65-VL4-L66-VH4-L67-VH3-L68-CH1-L69-CL-L70-Fc; VH3-L71-VH4-L72-VL4-L73-VL3-L74-CH1-L75-CL-L76-Fc; VL3-L77-VL4-L78-VH4-L79-VH3-L80-CL-L81-CH1-L82-Fc; or VH3-L83-VH4-L84-VL4-L85-VL3-L86-CL-L87-CH1-L88-Fc; wherein VL1 is a first immunoglobulin light chain variable region that specifically binds to A2AR, APRIL, ATPDase, BAFF, BAFFR, BCMA, BlyS, BTK, BTLA, B7DC, B7H1, B7H2, B7H3, B7H4, B7H5, B7H6, B7H7, B7RP1, B7-4, C3, C5, CCL2, CCL3, CCL4, CCL5, CCL7, CCL8, CCL11, CCL15, CCL17, CCL19, CCL20, CCL21, CCL25, CCR3, CCR4, CD16A, CD19, CD20, CD24, CD27, CD28, CD30, CD38, CD39, CD40, CD40L, CD47, CD52, CD70, CD80, CD86, CD123, CD133, CD137, CD137L, CD160, CD272, CEACAM5, CLEC9, CLEC91, CRTH2, CSF-1, CSF-2, CSF-3, CXCL1, CXCL2, CXCL4, CXCL12, CXCL13, CXCR3, cMet, CTLA4, DLL3, DLL4, DNGR-1, E-cadherin, EGFR, ENTPD1, EpCAM, FCER1, FCER1A, FCER2, FGFR, FLAP, FOLH1, Gi24, GITR, GITRL, GPR5, GP100, GPRC5D, HER2, HER3, ICOSL, ICOS, HHLA2, HMGB1, HVEM, IDO, IFNa, IgE, IGF1R, IL2Rbeta, IL1, ILIA, IL1B, IL1F10, IL2, IL4, IL4Ra, IL5, IL5R, IL6, IL7, IL7Ra, IL8, IL9, IL9R, IL10, rhILlO, IL12, IL13, IL13Ra1, IL13Ra2, IL15, IL17, IL17Rb, IL18, IL22, IL23, IL25, IL7, IL33, IL35, ITGB4, ITK, KIR, LAG3, LAMP1, leptin, LPFS2, MHC class II, MUC-1, MUC-16, NCR3LG1, NKG2D, NKp46, NTPDase-1, OX40, OX40L, PD-1, PD-L1, PD-L2, PROM1, S152, SIRPalpha, SISP1, SLC, SPG64, ST2, STEAP1, STEAP2, Syk kinase, STEAP1, TROP2, TACI, TDO, TGFBETA, T14, TIGIT, TIM3, TLR, TLR2, TLR4, TLR5, TLR9, TMEF1, TNFa, TNFRSF7, Tp55, TREM1, TSLP, TSLPR, TWEAK, VEGF, VISTA, Vstm3, or WUCAM; VL2 is a second immunoglobulin light chain variable region that specifically binds to CD28; VL3 is a third immunoglobulin light chain variable region that specifically binds to A2AR, APRIL, ATPDase, BAFF, BAFFR, BCMA, BlyS, BTK, BTLA, B7DC, B7H1, B7H2, B7H3, B7H4, B7H5, B7H6, B7H7, B7RP1, B7-4, C3, C5, CCL2, CCL3, CCL4, CCL5, CCL7, CCL8, CCL11, CCL15, CCL17, CCL19, CCL20, CCL21, CCL25, CCR3, CCR4, CD16A, CD19, CD20, CD24, CD27, CD28, CD30, CD38, CD39, CD40, CD40L, CD47, CD52, CD70, CD80, CD86, CD123, CD133, CD137, CD137L, CD160, CD272, CEACAM5, CLEC9, CLEC91, CRTH2, CSF-1, CSF-2, CSF-3, CXCL1, CXCL2, CXCL4, CXCL12, CXCL13, CXCR3, cMet, CTLA4, DLL3, DLL4, DNGR-1, E-cadherin, EGFR, ENTPD1, EpCAM, FCER1, FCER1A, FCER2, FGFR, FLAP, FOLH1, Gi24, GITR, GITRL, GPR5, GP100, GPRC5D, HER2, HER3, ICOSL, ICOS, HHLA2, HMGB1, HVEM, IDO, IFNa, IgE, IGF1R, IL2Rbeta, IL1, ILIA, IL1B, IL1F10, IL2, IL4, IL4Ra, IL5, IL5R, IL6, IL7, IL7Ra, IL8, IL9, IL9R, IL10, rhILlO, IL12, IL13, IL13Ra1, IL13Ra2, IL15, IL17, IL17Rb, IL18, IL22, IL23, IL25, IL7, IL33, IL35, ITGB4, ITK, KIR, LAG3, LAMP1, leptin, LPFS2, MHC class II, MUC-1, MUC-16, NCR3LG1, NKG2D, NKp46, NTPDase-1, OX40, OX40L, PD-1, PD-L1, PD-L2, PROM1, S152, SIRPalpha, SISP1, SLC, SPG64, ST2, STEAP1, STEAP2, Syk kinase, STEAP1, TROP2, TACI, TDO, TGFBETA, T14, TIGIT, TIM3, TLR, TLR2, TLR4, TLR5, TLR9, TMEF1, TNFa, TNFRSF7, Tp55, TREM1, TSLP, TSLPR, TWEAK, VEGF, VISTA, Vstm3, or WUCAM; VL4 is a fourth immunoglobulin light chain variable region that specifically binds to CD3; VH1 is a first immunoglobulin heavy chain variable region that specifically binds to A2AR, APRIL, ATPDase, BAFF, BAFFR, BCMA, BlyS, BTK, BTLA, B7DC, B7H1, B7H2, B7H3, B7H4, B7H5, B7H6, B7H7, B7RP1, B7-4, C3, C5, CCL2, CCL3, CCL4, CCL5, CCL7, CCL8, CCL11, CCL15, CCL17, CCL19, CCL20, CCL21, CCL25, CCR3, CCR4, CD16A, CD19, CD20, CD24, CD27, CD28, CD30, CD38, CD39, CD40, CD40L, CD47, CD52, CD70, CD80, CD86, CD123, CD133, CD137, CD137L, CD160, CD272, CEACAM5, CLEC9, CLEC91, CRTH2, CSF-1, CSF-2, CSF-3, CXCL1, CXCL2, CXCL4, CXCL12, CXCL13, CXCR3, cMet, CTLA4, DLL3, DLL4, DNGR-1, E-cadherin, EGFR, ENTPD1, EpCAM, FCER1, FCER1A, FCER2, FGFR, FLAP, FOLH1, Gi24, GITR, GITRL, GPR5, GP100, GPRC5D, HER2, HER3, ICOSL, ICOS, HHLA2, HMGB1, HVEM, IDO, IFNa, IgE, IGF1R, IL2Rbeta, IL1, ILIA, IL1B, IL1F10, IL2, IL4, IL4Ra, IL5, IL5R, IL6, IL7, IL7Ra, IL8, IL9, IL9R, IL10, rhILlO, IL12, IL13, IL13Ra1, IL13Ra2, IL15, IL17, IL17Rb, IL18, IL22, IL23, IL25, IL7, IL33, IL35, ITGB4, ITK, KIR, LAG3, LAMP1, leptin, LPFS2, MHC class II, MUC-1, MUC-16, NCR3LG1, NKG2D, NKp46, NTPDase-1, OX40, OX40L, PD-1, PD-L1, PD-L2, PROM1, S152, SIRPalpha, SISP1, SLC, SPG64, ST2, STEAP1, STEAP2, Syk kinase, STEAP1, TROP2, TACI, TDO, TGFBETA, T14, TIGIT, TIM3, TLR, TLR2, TLR4, TLR5, TLR9, TMEF1, TNFa, TNFRSF7, Tp55, TREM1, TSLP, TSLPR, TWEAK, VEGF, VISTA, Vstm3, or WUCAM; VH2 is a second immunoglobulin heavy chain variable region that specifically binds to CD28; VH3 is a third immunoglobulin heavy chain variable region that specifically binds to A2AR, APRIL, ATPDase, BAFF, BAFFR, BCMA, BlyS, BTK, BTLA, B7DC, B7H1, B7H2, B7H3, B7H4, B7H5, B7H6, B7H7, B7RP1, B7-4, C3, C5, CCL2, CCL3, CCL4, CCL5, CCL7, CCL8, CCL11, CCL15, CCL17, CCL19, CCL20, CCL21, CCL25, CCR3, CCR4, CD16A, CD19, CD20, CD24, CD27, CD28, CD30, CD38, CD39, CD40, CD40L, CD47, CD52, CD70, CD80, CD86, CD123, CD133, CD137, CD137L, CD160, CD272, CEACAM5, CLEC9, CLEC91, CRTH2, CSF-1, CSF-2, CSF-3, CXCL1, CXCL2, CXCL4, CXCL12, CXCL13, CXCR3, cMet, CTLA4, DLL3, DLL4, DNGR-1, E-cadherin, EGFR, ENTPD1, EpCAM, FCER1, FCER1A, FCER2, FGFR, FLAP, FOLH1, Gi24, GITR, GITRL, GPR5, GP100, GPRC5D, HER2, HER3, ICOSL, ICOS, HHLA2, HMGB1, HVEM, IDO, IFNa, IgE, IGF1R, IL2Rbeta, IL1, ILIA, IL1B, IL1F10, IL2, IL4, IL4Ra, IL5, IL5R, IL6, IL7, IL7Ra, IL8, IL9, IL9R, IL10, rhILlO, IL12, IL13, IL13Ra1, IL13Ra2, IL15, IL17, IL17Rb, IL18, IL22, IL23, IL25, IL7, IL33, IL35, ITGB4, ITK, KIR, LAG3, LAMP1, leptin, LPFS2, MHC class II, MUC-1, MUC-16, NCR3LG1, NKG2D, NKp46, NTPDase-1, OX40, OX40L, PD-1, PD-L1, PD-L2, PROM1, S152, SIRPalpha, SISP1, SLC, SPG64, ST2, STEAP1, STEAP2, Syk kinase, STEAP1, TROP2, TACI, TDO, TGFBETA, T14, TIGIT, TIM3, TLR, TLR2, TLR4, TLR5, TLR9, TMEF1, TNFa, TNFRSF7, Tp55, TREM1, TSLP, TSLPR, TWEAK, VEGF, VISTA, Vstm3, or WUCAM; VH4 is a fourth immunoglobulin heavy chain variable region that specifically binds to CD3; Fc is a region comprising an immunoglobulin heavy chain constant region 2 (CH2), an immunoglobulin heavy chain constant region 3 (CH3), and optionally, an immunoglobulin hinge; CH1 is an immunoglobulin heavy chain constant region 1; CL is an immunoglobulin light chain constant region; and L1-L88 are amino acid linkers. In some aspects, the first polypeptide has a structure represented by VL1-L1-VL2-L2-VH2-L3-VH1-L4-CH1-L5-Fc; VH1-L6-VH2-L7-VL2-L8-VL1-L9-CH1-L10-Fc; VL1-L11-VL2-L12-VH2-L13-VH1-L14-CL-L15-Fc; VH1-L16-VH2-L17-VL2-L18-VL1-L19-CL-L20-Fc; VL1-L21-VL2-L22-VH2-L23-VH1-L24-CH1-L25-CL-L26-Fc; VH1-L27-VH2-L28-VL2-L29-VL1-L30-CH1-L31-CL-L32-Fc; VL1-L33-VL2-L34-VH2-L35-VH1-L36-CL-L37-CH1-L38-Fc; or VH1-L39-VH2-L40-VL2-L41-VL1-L42-CL-L43-CH1-L44-Fc and the second polypeptide has a structure represented by VL3-L45-VL4-L46-VH4-L47-VH3-L48-CH1-L49-Fc. In some aspects, the first polypeptide has a structure represented by VL1-L1-VL2-L2-VH2-L3-VH1-L4-CH1-L5-Fc; VH1-L6-VH2-L7-VL2-L8-VL1-L9-CH1-L10-Fc; VL1-L11-VL2-L12-VH2-L13-VH1-L14-CL-L15-Fc; VH1-L16-VH2-L17-VL2-L18-VL1-L19-CL-L20-Fc; VL1-L21-VL2-L22-VH2-L23-VH1-L24-CH1-L25-CL-L26-Fc; VH1-L27-VH2-L28-VL2-L29-VL1-L30-CH1-L31-CL-L32-Fc; VL1-L33-VL2-L34-VH2-L35-VH1-L36-CL-L37-CH1-L38-Fc; or VH1-L39-VH2-L40-VL2-L41-VL1-L42-CL-L43-CH1-L44-Fc and the second polypeptide has a structure represented by VH3-L50-VH4-L51-VL4-L52-VL3-L53-CH1-L54-Fc. In some aspects, the first polypeptide has a structure represented by VL1-L1-VL2-L2-VH2-L3-VH1-L4-CH1-L5-Fc; VH1-L6-VH2-L7-VL2-L8-VL1-L9-CH1-L10-Fc; VL1-L11-VL2-L12-VH2-L13-VH1-L14-CL-L15-Fc; VH1-L16-VH2-L17-VL2-L18-VL1-L19-CL-L20-Fc; VL1-L21-VL2-L22-VH2-L23-VH1-L24-CH1-L25-CL-L26-Fc; VH1-L27-VH2-L28-VL2-L29-VL1-L30-CH1-L31-CL-L32-Fc; VL1-L33-VL2-L34-VH2-L35-VH1-L36-CL-L37-CH1-L38-Fc; or VH1-L39-VH2-L40-VL2-L41-VL1-L42-CL-L43-CH1-L44-Fc and the second polypeptide has a structure represented by VL3-L55-VL4-L56-VH4-L57-VH3-L58-CL-L59-Fc. In some aspects, the first polypeptide has a structure represented by VL1-L1-VL2-L2-VH2-L3-VH1-L4-CH1-L5-Fc; VH1-L6-VH2-L7-VL2-L8-VL1-L9-CH1-L10-Fc; VL1-L11-VL2-L12-VH2-L13-VH1-L14-CL-L15-Fc; VH1-L16-VH2-L17-VL2-L18-VL1-L19-CL-L20-Fc; VL1-L21-VL2-L22-VH2-L23-VH1-L24-CH1-L25-CL-L26-Fc; VH1-L27-VH2-L28-VL2-L29-VL1-L30-CH1-L31-CL-L32-Fc; VL1-L33-VL2-L34-VH2-L35-VH1-L36-CL-L37-CH1-L38-Fc; or VH1-L39-VH2-L40-VL2-L41-VL1-L42-CL-L43-CH1-L44-Fc and the second polypeptide has a structure represented by VH3-L60-VH4-L61-VL4-L62-VL3-L63-CL-L64-Fc. In some aspects, the first polypeptide has a structure represented by VL1-L1-VL2-L2-VH2-L3-VH1-L4-CH1-L5-Fc; VH1-L6-VH2-L7-VL2-L8-VL1-L9-CH1-L10-Fc; VL1-L11-VL2-L12-VH2-L13-VH1-L14-CL-L15-Fc; VH1-L16-VH2-L17-VL2-L18-VL1-L19-CL-L20-Fc; VL1-L21-VL2-L22-VH2-L23-VH1-L24-CH1-L25-CL-L26-Fc; VH1-L27-VH2-L28-VL2-L29-VL1-L30-CH1-L31-CL-L32-Fc; VL1-L33-VL2-L34-VH2-L35-VH1-L36-CL-L37-CH1-L38-Fc; or VH1-L39-VH2-L40-VL2-L41-VL1-L42-CL-L43-CH1-L44-Fc and the second polypeptide has a structure represented by VL3-L65-VL4-L66-VH4-L67-VH3-L68-CH1-L69-CL-L70-Fc. In some aspects, the first polypeptide has a structure represented by VL1-L1-VL2-L2-VH2-L3-VH1-L4-CH1-L5-Fc; VH1-L6-VH2-L7-VL2-L8-VL1-L9-CH1-L10-Fc; VL1-L11-VL2-L12-VH2-L13-VH1-L14-CL-L15-Fc; VH1-L16-VH2-L17-VL2-L18-VL1-L19-CL-L20-Fc; VL1-L21-VL2-L22-VH2-L23-VH1-L24-CH1-L25-CL-L26-Fc; VH1-L27-VH2-L28-VL2-L29-VL1-L30-CH1-L31-CL-L32-Fc; VL1-L33-VL2-L34-VH2-L35-VH1-L36-CL-L37-CH1-L38-Fc; or VH1-L39-VH2-L40-VL2-L41-VL1-L42-CL-L43-CH1-L44-Fc and the second polypeptide has a structure represented by VH3-L71-VH4-L72-VL4-L73-VL3-L74-CH1-L75-CL-L76-Fc. In some aspects, the first polypeptide has a structure represented by VL1-L1-VL2-L2-VH2-L3-VH1-L4-CH1-L5-Fc; VH1-L6-VH2-L7-VL2-L8-VL1-L9-CH1-L10-Fc; VL1-L11-VL2-L12-VH2-L13-VH1-L14-CL-L15-Fc; VH1-L16-VH2-L17-VL2-L18-VL1-L19-CL-L20-Fc; VL1-L21-VL2-L22-VH2-L23-VH1-L24-CH1-L25-CL-L26-Fc; VH1-L27-VH2-L28-VL2-L29-VL1-L30-CH1-L31-CL-L32-Fc; VL1-L33-VL2-L34-VH2-L35-VH1-L36-CL-L37-CH1-L38-Fc; or VH1-L39-VH2-L40-VL2-L41-VL1-L42-CL-L43-CH1-L44-Fc and the second polypeptide has a structure represented by VL3-L77-VL4-L78-VH4-L79-VH3-L80-CL-L81-CH1-L82-Fc. In some aspects, the first polypeptide has a structure represented by VL1-L1-VL2-L2-VH2-L3-VH1-L4-CH1-L5-Fc; VH1-L6-VH2-L7-VL2-L8-VL1-L9-CH1-L10-Fc; VL1-L11-VL2-L12-VH2-L13-VH1-L14-CL-L15-Fc; VH1-L16-VH2-L17-VL2-L18-VL1-L19-CL-L20-Fc; VL1-L21-VL2-L22-VH2-L23-VH1-L24-CH1-L25-CL-L26-Fc; VH1-L27-VH2-L28-VL2-L29-VL1-L30-CH1-L31-CL-L32-Fc; VL1-L33-VL2-L34-VH2-L35-VH1-L36-CL-L37-CH1-L38-Fc; or VH1-L39-VH2-L40-VL2-L41-VL1-L42-CL-L43-CH1-L44-Fc and the second polypeptide has a structure represented by VH3-L83-VH4-L84-VL4-L85-VL3-L86-CL-L87-CH1-L88-Fc. In some aspects, VL1 and VH1 specifically bind to A2AR, APRIL, ATPDase, BAFF, BAFFR, BCMA, BlyS, BTK, BTLA, B7DC, B7H1, B7H2, B7H3, B7H4, B7H5, B7H6, B7H7, B7RP1, B7-4, C3, C5, CCL2, CCL3, CCL4, CCL5, CCL7, CCL8, CCL11, CCL15, CCL17, CCL19, CCL20, CCL21, CCL25, CCR3, CCR4, CD16A, CD19, CD20, CD24, CD27, CD28, CD30, CD38, CD39, CD40, CD40L, CD47, CD52, CD70, CD80, CD86, CD123, CD133, CD137, CD137L, CD160, CD272, CEACAM5, CLEC9, CLEC91, CRTH2, CSF-1, CSF-2, CSF-3, CXCL1, CXCL2, CXCL4, CXCL12, CXCL13, CXCR3, cMet, CTLA4, DLL3, DLL4, DNGR-1, E-cadherin, EGFR, ENTPD1, EpCAM, FCER1, FCER1A, FCER2, FGFR, FLAP, FOLH1, Gi24, GITR, GITRL, GPR5, GP100, GPRC5D, HER2, HER3, ICOSL, ICOS, HHLA2, HMGB1, HVEM, IDO, IFNa, IgE, IGF1R, IL2Rbeta, IL1, ILIA, IL1B, IL1F10, IL2, IL4, IL4Ra, IL5, IL5R, IL6, IL7, IL7Ra, IL8, IL9, IL9R, IL10, rhILlO, IL12, IL13, IL13Ra1, IL13Ra2, IL15, IL17, IL17Rb, IL18, IL22, IL23, IL25, IL7, IL33, IL35, ITGB4, ITK, KIR, LAG3, LAMP1, leptin, LPFS2, MHC class II, MUC-1, MUC-16, NCR3LG1, NKG2D, NKp46, NTPDase-1, OX40, OX40L, PD-1, PD-L1, PD-L2, PROM1, S152, SIRPalpha, SISP1, SLC, SPG64, ST2, STEAP1, STEAP2, Syk kinase, STEAP1, TROP2, TACI, TDO, TGFBETA, T14, TIGIT, TIM3, TLR, TLR2, TLR4, TLR5, TLR9, TMEF1, TNFa, TNFRSF7, Tp55, TREM1, TSLP, TSLPR, TWEAK, VEGF, VISTA, Vstm3, or WUCAM. In some aspects, VL3 and VH3 specifically bind to A2AR, APRIL, ATPDase, BAFF, BAFFR, BCMA, BlyS, BTK, BTLA, B7DC, B7H1, B7H2, B7H3, B7H4, B7H5, B7H6, B7H7, B7RP1, B7-4, C3, C5, CCL2, CCL3, CCL4, CCL5, CCL7, CCL8, CCL11, CCL15, CCL17, CCL19, CCL20, CCL21, CCL25, CCR3, CCR4, CD16A, CD19, CD20, CD24, CD27, CD28, CD30, CD38, CD39, CD40, CD40L, CD47, CD52, CD70, CD80, CD86, CD123, CD133, CD137, CD137L, CD160, CD272, CEACAM5, CLEC9, CLEC91, CRTH2, CSF-1, CSF-2, CSF-3, CXCL1, CXCL2, CXCL4, CXCL12, CXCL13, CXCR3, cMet, CTLA4, DLL3, DLL4, DNGR-1, E-cadherin, EGFR, ENTPD1, EpCAM, FCER1, FCER1A, FCER2, FGFR, FLAP, FOLH1, Gi24, GITR, GITRL, GPR5, GP100, GPRC5D, HER2, HER3, ICOSL, ICOS, HHLA2, HMGB1, HVEM, IDO, IFNa, IgE, IGF1R, IL2Rbeta, IL1, ILIA, IL1B, IL1F10, IL2, IL4, IL4Ra, IL5, IL5R, IL6, IL7, IL7Ra, IL8, IL9, IL9R, IL10, rhILlO, IL12, IL13, IL13Ra1, IL13Ra2, IL15, IL17, IL17Rb, IL18, IL22, IL23, IL25, IL7, IL33, IL35, ITGB4, ITK, KIR, LAG3, LAMP1, leptin, LPFS2, MHC class II, MUC-1, MUC-16, NCR3LG1, NKG2D, NKp46, NTPDase-1, OX40, OX40L, PD-1, PD-L1, PD-L2, PROM1, S152, SIRPalpha, SISP1, SLC, SPG64, ST2, STEAP1, STEAP2, Syk kinase, STEAP1, TROP2, TACI, TDO, TGFBETA, T14, TIGIT, TIM3, TLR, TLR2, TLR4, TLR5, TLR9, TMEF1, TNFa, TNFRSF7, Tp55, TREM1, TSLP, TSLPR, TWEAK, VEGF, VISTA, Vstm3, or WUCAM. The VL1, VL3, VH1, and/or VH3 may specifically bind to CD28, cMet, Trop2, CD20, or CD19; VL2 and/or VH2 may specifically bind to CD28; and VL4 and/or VH4 may specifically bind to CD3. For example, the antigen binding polypeptide complex may specifically bind CD28, CD3, cMet, and Trop2. For example, the antigen binding polypeptide complex may specifically bind CD28, CD3, CD19, and CD20. For example, VL1 and VH1 may specifically bind to cMet. For example, VL3 and VH3 may specifically bind to cMet. For example, VL1 and VH1 may specifically bind to Trop2. For example, VL3 and VH3 may specifically bind to Trop2. For example, VL1 and VH1 may specifically bind to CD19. For example, VL3 and VH3 may specifically bind to CD19. For example, VL1 and VH1 may specifically bind to CD20. For example, VL3 and VH3 may specifically bind to CD20.

[0199] In some aspects, the invention is directed to an antigen binding polypeptide complex comprising a first polypeptide and a second polypeptide; wherein the first polypeptide has a structure represented by VL1-L1-VL2-L2-VH2-L3-VH1-L4-CH1-L5-Fc; VH1-L6-VH2-L7-VL2-L8-VL1-L9-CH1-L10-Fc; VL1-L11-VL2-L12-VH2-L13-VH1-L14-CL-L15-Fc; VH1-L16-VH2-L17-VL2-L18-VL1-L19-CL-L20-Fc; VL1-L21-VL2-L22-VH2-L23-VH1-L24-CH1-L25-CL-L26-Fc; VH1-L27-VH2-L28-VL2-L29-VL1-L30-CH1-L31-CL-L32-Fc; VL1-L33-VL2-L34-VH2-L35-VH1-L36-CL-L37-CH1-L38-Fc; or VH1-L39-VH2-L40-VL2-L41-VL1-L42-CL-L43-CH1-L44-Fc; wherein the second polypeptide has a structure represented by VL3-L45-VL4-L46-VH4-L47-VH3-L48-CH1-L49-Fc; VH3-L50-VH4-L51-VL4-L52-VL3-L53-CH1-L54-Fc; VL3-L55-VL4-L56-VH4-L57-VH3-L58-CL-L59-Fc; VH3-L60-VH4-L61-VL4-L62-VL3-L63-CL-L64-Fc; VL3-L65-VL4-L66-VH4-L67-VH3-L68-CH1-L69-CL-L70-Fc; VH3-L71-VH4-L72-VL4-L73-VL3-L74-CH1-L75-CL-L76-Fc; VL3-L77-VL4-L78-VH4-L79-VH3-L80-CL-L81-CH1-L82-Fc; or VH3-L83-VH4-L84-VL4-L85-VL3-L86-CL-L87-CH1-L88-Fc; wherein VL1 is a first immunoglobulin light chain variable region that specifically binds to A2AR, APRIL, ATPDase, BAFF, BAFFR, BCMA, BlyS, BTK, BTLA, B7DC, B7H1, B7H2, B7H3, B7H4, B7H5, B7H6, B7H7, B7RP1, B7-4, C3, C5, CCL2, CCL3, CCL4, CCL5, CCL7, CCL8, CCL11, CCL15, CCL17, CCL19, CCL20, CCL21, CCL25, CCR3, CCR4, CD16A, CD19, CD20, CD24, CD27, CD28, CD30, CD38, CD39, CD40, CD40L, CD47, CD52, CD70, CD80, CD86, CD123, CD133, CD137, CD137L, CD160, CD272, CEACAM5, CLEC9, CLEC91, CRTH2, CSF-1, CSF-2, CSF-3, CXCL1, CXCL2, CXCL4, CXCL12, CXCL13, CXCR3, cMet, CTLA4, DLL3, DLL4, DNGR-1, E-cadherin, EGFR, ENTPD1, EpCAM, FCER1, FCER1A, FCER2, FGFR, FLAP, FOLH1, Gi24, GITR, GITRL, GPR5, GP100, GPRC5D, HER2, HER3, ICOSL, ICOS, HHLA2, HMGB1, HVEM, IDO, IFNa, IgE, IGF1R, IL2Rbeta, IL1, ILIA, IL1B, IL1F10, IL2, IL4, IL4Ra, IL5, IL5R, IL6, IL7, IL7Ra, IL8, IL9, IL9R, IL10, rhILlO, IL12, IL13, IL13Ra1, IL13Ra2, IL15, IL17, IL17Rb, IL18, IL22, IL23, IL25, IL7, IL33, IL35, ITGB4, ITK, KIR, LAG3, LAMP1, leptin, LPFS2, MHC class II, MUC-1, MUC-16, NCR3LG1, NKG2D, NKp46, NTPDase-1, OX40, OX40L, PD-1, PD-L1, PD-L2, PROM1, S152, SIRPalpha, SISP1, SLC, SPG64, ST2, STEAP1, STEAP2, Syk kinase, STEAP1, TROP2, TACI, TDO, TGFBETA, T14, TIGIT, TIM3, TLR, TLR2, TLR4, TLR5, TLR9, TMEF1, TNFa, TNFRSF7, Tp55, TREM1, TSLP, TSLPR, TWEAK, VEGF, VISTA, Vstm3, or WUCAM; VL2 is a second immunoglobulin light chain variable region that specifically binds to A2AR, APRIL, ATPDase, BAFF, BAFFR, BCMA, BlyS, BTK, BTLA, B7DC, B7H1, B7H2, B7H3, B7H4, B7H5, B7H6, B7H7, B7RP1, B7-4, C3, C5, CCL2, CCL3, CCL4, CCL5, CCL7, CCL8, CCL11, CCL15, CCL17, CCL19, CCL20, CCL21, CCL25, CCR3, CCR4, CD16A, CD19, CD20, CD24, CD27, CD28, CD30, CD38, CD39, CD40, CD40L, CD47, CD52, CD70, CD80, CD86, CD123, CD133, CD137, CD137L, CD160, CD272, CEACAM5, CLEC9, CLEC91, CRTH2, CSF-1, CSF-2, CSF-3, CXCL1, CXCL2, CXCL4, CXCL12, CXCL13, CXCR3, cMet, CTLA4, DLL3, DLL4, DNGR-1, E-cadherin, EGFR, ENTPD1, EpCAM, FCER1, FCER1A, FCER2, FGFR, FLAP, FOLH1, Gi24, GITR, GITRL, GPR5, GP100, GPRC5D, HER2, HER3, ICOSL, ICOS, HHLA2, HMGB1, HVEM, IDO, IFNa, IgE, IGF1R, IL2Rbeta, IL1, ILIA, IL1B, IL1F10, IL2, IL4, IL4Ra, IL5, IL5R, IL6, IL7, IL7Ra, IL8, IL9, IL9R, IL10, rhILlO, IL12, IL13, IL13Ra1, IL13Ra2, IL15, IL17, IL17Rb, IL18, IL22, IL23, IL25, IL7, IL33, IL35, ITGB4, ITK, KIR, LAG3, LAMP1, leptin, LPFS2, MHC class II, MUC-1, MUC-16, NCR3LG1, NKG2D, NKp46, NTPDase-1, OX40, OX40L, PD-1, PD-L1, PD-L2, PROM1, S152, SIRPalpha, SISP1, SLC, SPG64, ST2, STEAP1, STEAP2, Syk kinase, STEAP1, TROP2, TACI, TDO, TGFBETA, T14, TIGIT, TIM3, TLR, TLR2, TLR4, TLR5, TLR9, TMEF1, TNFa, TNFRSF7, Tp55, TREM1, TSLP, TSLPR, TWEAK, VEGF, VISTA, Vstm3, or WUCAM; VL3 is a third immunoglobulin light chain variable region that specifically binds to CD28; VL4 is a fourth immunoglobulin light chain variable region that specifically binds to CD3; VH1 is a first immunoglobulin heavy chain variable region that specifically binds to A2AR, APRIL, ATPDase, BAFF, BAFFR, BCMA, BlyS, BTK, BTLA, B7DC, B7H1, B7H2, B7H3, B7H4, B7H5, B7H6, B7H7, B7RP1, B7-4, C3, C5, CCL2, CCL3, CCL4, CCL5, CCL7, CCL8, CCL11, CCL15, CCL17, CCL19, CCL20, CCL21, CCL25, CCR3, CCR4, CD16A, CD19, CD20, CD24, CD27, CD28, CD30, CD38, CD39, CD40, CD40L, CD47, CD52, CD70, CD80, CD86, CD123, CD133, CD137, CD137L, CD160, CD272, CEACAM5, CLEC9, CLEC91, CRTH2, CSF-1, CSF-2, CSF-3, CXCL1, CXCL2, CXCL4, CXCL12, CXCL13, CXCR3, cMet, CTLA4, DLL3, DLL4, DNGR-1, E-cadherin, EGFR, ENTPD1, EpCAM, FCER1, FCER1A, FCER2, FGFR, FLAP, FOLH1, Gi24, GITR, GITRL, GPR5, GP100, GPRC5D, HER2, HER3, ICOSL, ICOS, HHLA2, HMGB1, HVEM, IDO, IFNa, IgE, IGF1R, IL2Rbeta, IL1, ILIA, IL1B, IL1F10, IL2, IL4, IL4Ra, IL5, IL5R, IL6, IL7, IL7Ra, IL8, IL9, IL9R, IL10, rhILlO, IL12, IL13, IL13Ra1, IL13Ra2, IL15, IL17, IL17Rb, IL18, IL22, IL23, IL25, IL7, IL33, IL35, ITGB4, ITK, KIR, LAG3, LAMP1, leptin, LPFS2, MHC class II, MUC-1, MUC-16, NCR3LG1, NKG2D, NKp46, NTPDase-1, OX40, OX40L, PD-1, PD-L1, PD-L2, PROM1, S152, SIRPalpha, SISP1, SLC, SPG64, ST2, STEAP1, STEAP2, Syk kinase, STEAP1, TROP2, TACI, TDO, TGFBETA, T14, TIGIT, TIM3, TLR, TLR2, TLR4, TLR5, TLR9, TMEF1, TNFa, TNFRSF7, Tp55, TREM1, TSLP, TSLPR, TWEAK, VEGF, VISTA, Vstm3, or WUCAM; VH2 is a second immunoglobulin heavy chain variable region that specifically binds to A2AR, APRIL, ATPDase, BAFF, BAFFR, BCMA, BlyS, BTK, BTLA, B7DC, B7H1, B7H2, B7H3, B7H4, B7H5, B7H6, B7H7, B7RP1, B7-4, C3, C5, CCL2, CCL3, CCL4, CCL5, CCL7, CCL8, CCL11, CCL15, CCL17, CCL19, CCL20, CCL21, CCL25, CCR3, CCR4, CD16A, CD19, CD20, CD24, CD27, CD28, CD30, CD38, CD39, CD40, CD40L, CD47, CD52, CD70, CD80, CD86, CD123, CD133, CD137, CD137L, CD160, CD272, CEACAM5, CLEC9, CLEC91, CRTH2, CSF-1, CSF-2, CSF-3, CXCL1, CXCL2, CXCL4, CXCL12, CXCL13, CXCR3, cMet, CTLA4, DLL3, DLL4, DNGR-1, E-cadherin, EGFR, ENTPD1, EpCAM, FCER1, FCER1A, FCER2, FGFR, FLAP, FOLH1, Gi24, GITR, GITRL, GPR5, GP100, GPRC5D, HER2, HER3, ICOSL, ICOS, HHLA2, HMGB1, HVEM, IDO, IFNa, IgE, IGF1R, IL2Rbeta, IL1, ILIA, IL1B, IL1F10, IL2, IL4, IL4Ra, IL5, IL5R, IL6, IL7, IL7Ra, IL8, IL9, IL9R, IL10, rhILlO, IL12, IL13, IL13Ra1, IL13Ra2, IL15, IL17, IL17Rb, IL18, IL22, IL23, IL25, IL7, IL33, IL35, ITGB4, ITK, KIR, LAG3, LAMP1, leptin, LPFS2, MHC class II, MUC-1, MUC-16, NCR3LG1, NKG2D, NKp46, NTPDase-1, OX40, OX40L, PD-1, PD-L1, PD-L2, PROM1, S152, SIRPalpha, SISP1, SLC, SPG64, ST2, STEAP1, STEAP2, Syk kinase, STEAP1, TROP2, TACI, TDO, TGFBETA, T14, TIGIT, TIM3, TLR, TLR2, TLR4, TLR5, TLR9, TMEF1, TNFa, TNFRSF7, Tp55, TREM1, TSLP, TSLPR, TWEAK, VEGF, VISTA, Vstm3, or WUCAM; VH3 is a third immunoglobulin heavy chain variable region that specifically binds to CD28; VH4 is a fourth immunoglobulin heavy chain variable region that specifically binds to CD3; Fc is a region comprising an immunoglobulin heavy chain constant region 2 (CH2), an immunoglobulin heavy chain constant region 3 (CH3), and optionally, an immunoglobulin hinge; CH1 is an immunoglobulin heavy chain constant region 1; CL is an immunoglobulin light chain constant region; and L1-L88 are amino acid linkers. In some aspects, the first polypeptide has a structure represented by VL1-L1-VL2-L2-VH2-L3-VH1-L4-CH1-L5-Fc; VH1-L6-VH2-L7-VL2-L8-VL1-L9-CH1-L10-Fc; VL1-L11-VL2-L12-VH2-L13-VH1-L14-CL-L15-Fc; VH1-L16-VH2-L17-VL2-L18-VL1-L19-CL-L20-Fc; VL1-L21-VL2-L22-VH2-L23-VH1-L24-CH1-L25-CL-L26-Fc; VH1-L27-VH2-L28-VL2-L29-VL1-L30-CH1-L31-CL-L32-Fc; VL1-L33-VL2-L34-VH2-L35-VH1-L36-CL-L37-CH1-L38-Fc; or VH1-L39-VH2-L40-VL2-L41-VL1-L42-CL-L43-CH1-L44-Fc and the second polypeptide has a structure represented by VL3-L45-VL4-L46-VH4-L47-VH3-L48-CH1-L49-Fc. In some aspects, the first polypeptide has a structure represented by VL1-L1-VL2-L2-VH2-L3-VH1-L4-CH1-L5-Fc; VH1-L6-VH2-L7-VL2-L8-VL1-L9-CH1-L10-Fc; VL1-L11-VL2-L12-VH2-L13-VH1-L14-CL-L15-Fc; VH1-L16-VH2-L17-VL2-L18-VL1-L19-CL-L20-Fc; VL1-L21-VL2-L22-VH2-L23-VH1-L24-CH1-L25-CL-L26-Fc; VH1-L27-VH2-L28-VL2-L29-VL1-L30-CH1-L31-CL-L32-Fc; VL1-L33-VL2-L34-VH2-L35-VH1-L36-CL-L37-CH1-L38-Fc; or VH1-L39-VH2-L40-VL2-L41-VL1-L42-CL-L43-CH1-L44-Fc and the second polypeptide has a structure represented by VH3-L50-VH4-L51-VL4-L52-VL3-L53-CH1-L54-Fc. In some aspects, the first polypeptide has a structure represented by VL1-L1-VL2-L2-VH2-L3-VH1-L4-CH1-L5-Fc; VH1-L6-VH2-L7-VL2-L8-VL1-L9-CH1-L10-Fc; VL1-L11-VL2-L12-VH2-L13-VH1-L14-CL-L15-Fc; VH1-L16-VH2-L17-VL2-L18-VL1-L19-CL-L20-Fc; VL1-L21-VL2-L22-VH2-L23-VH1-L24-CH1-L25-CL-L26-Fc; VH1-L27-VH2-L28-VL2-L29-VL1-L30-CH1-L31-CL-L32-Fc; VL1-L33-VL2-L34-VH2-L35-VH1-L36-CL-L37-CH1-L38-Fc; or VH1-L39-VH2-L40-VL2-L41-VL1-L42-CL-L43-CH1-L44-Fc and the second polypeptide has a structure represented by VL3-L55-VL4-L56-VH4-L57-VH3-L58-CL-L59-Fc. In some aspects, the first polypeptide has a structure represented by VL1-L1-VL2-L2-VH2-L3-VH1-L4-CH1-L5-Fc; VH1-L6-VH2-L7-VL2-L8-VL1-L9-CH1-L10-Fc; VL1-L11-VL2-L12-VH2-L13-VH1-L14-CL-L15-Fc; VH1-L16-VH2-L17-VL2-L18-VL1-L19-CL-L20-Fc; VL1-L21-VL2-L22-VH2-L23-VH1-L24-CH1-L25-CL-L26-Fc; VH1-L27-VH2-L28-VL2-L29-VL1-L30-CH1-L31-CL-L32-Fc; VL1-L33-VL2-L34-VH2-L35-VH1-L36-CL-L37-CH1-L38-Fc; or VH1-L39-VH2-L40-VL2-L41-VL1-L42-CL-L43-CH1-L44-Fc and the second polypeptide has a structure represented by VH3-L60-VH4-L61-VL4-L62-VL3-L63-CL-L64-Fc. In some aspects, the first polypeptide has a structure represented by VL1-L1-VL2-L2-VH2-L3-VH1-L4-CH1-L5-Fc; VH1-L6-VH2-L7-VL2-L8-VL1-L9-CH1-L10-Fc; VL1-L11-VL2-L12-VH2-L13-VH1-L14-CL-L15-Fc; VH1-L16-VH2-L17-VL2-L18-VL1-L19-CL-L20-Fc; VL1-L21-VL2-L22-VH2-L23-VH1-L24-CH1-L25-CL-L26-Fc; VH1-L27-VH2-L28-VL2-L29-VL1-L30-CH1-L31-CL-L32-Fc; VL1-L33-VL2-L34-VH2-L35-VH1-L36-CL-L37-CH1-L38-Fc; or VH1-L39-VH2-L40-VL2-L41-VL1-L42-CL-L43-CH1-L44-Fc and the second polypeptide has a structure represented by VL3-L65-VL4-L66-VH4-L67-VH3-L68-CH1-L69-CL-L70-Fc. In some aspects, the first polypeptide has a structure represented by VL1-L1-VL2-L2-VH2-L3-VH1-L4-CH1-L5-Fc; VH1-L6-VH2-L7-VL2-L8-VL1-L9-CH1-L10-Fc; VL1-L11-VL2-L12-VH2-L13-VH1-L14-CL-L15-Fc; VH1-L16-VH2-L17-VL2-L18-VL1-L19-CL-L20-Fc; VL1-L21-VL2-L22-VH2-L23-VH1-L24-CH1-L25-CL-L26-Fc; VH1-L27-VH2-L28-VL2-L29-VL1-L30-CH1-L31-CL-L32-Fc; VL1-L33-VL2-L34-VH2-L35-VH1-L36-CL-L37-CH1-L38-Fc; or VH1-L39-VH2-L40-VL2-L41-VL1-L42-CL-L43-CH1-L44-Fc and the second polypeptide has a structure represented by VH3-L71-VH4-L72-VL4-L73-VL3-L74-CH1-L75-CL-L76-Fc. In some aspects, the first polypeptide has a structure represented by VL1-L1-VL2-L2-VH2-L3-VH1-L4-CH1-L5-Fc; VH1-L6-VH2-L7-VL2-L8-VL1-L9-CH1-L10-Fc; VL1-L11-VL2-L12-VH2-L13-VH1-L14-CL-L15-Fc; VH1-L16-VH2-L17-VL2-L18-VL1-L19-CL-L20-Fc; VL1-L21-VL2-L22-VH2-L23-VH1-L24-CH1-L25-CL-L26-Fc; VH1-L27-VH2-L28-VL2-L29-VL1-L30-CH1-L31-CL-L32-Fc; VL1-L33-VL2-L34-VH2-L35-VH1-L36-CL-L37-CH1-L38-Fc; or VH1-L39-VH2-L40-VL2-L41-VL1-L42-CL-L43-CH1-L44-Fc and the second polypeptide has a structure represented by VL3-L77-VL4-L78-VH4-L79-VH3-L80-CL-L81-CH1-L82-Fc. In some aspects, the first polypeptide has a structure represented by VL1-L1-VL2-L2-VH2-L3-VH1-L4-CH1-L5-Fc; VH1-L6-VH2-L7-VL2-L8-VL1-L9-CH1-L10-Fc; VL1-L11-VL2-L12-VH2-L13-VH1-L14-CL-L15-Fc; VH1-L16-VH2-L17-VL2-L18-VL1-L19-CL-L20-Fc; VL1-L21-VL2-L22-VH2-L23-VH1-L24-CH1-L25-CL-L26-Fc; VH1-L27-VH2-L28-VL2-L29-VL1-L30-CH1-L31-CL-L32-Fc; VL1-L33-VL2-L34-VH2-L35-VH1-L36-CL-L37-CH1-L38-Fc; or VH1-L39-VH2-L40-VL2-L41-VL1-L42-CL-L43-CH1-L44-Fc and the second polypeptide has a structure represented by VH3-L83-VH4-L84-VL4-L85-VL3-L86-CL-L87-CH1-L88-Fc. In some aspects, VL1 and VH1 specifically bind to A2AR, APRIL, ATPDase, BAFF, BAFFR, BCMA, BlyS, BTK, BTLA, B7DC, B7H1, B7H2, B7H3, B7H4, B7H5, B7H6, B7H7, B7RP1, B7-4, C3, C5, CCL2, CCL3, CCL4, CCL5, CCL7, CCL8, CCL11, CCL15, CCL17, CCL19, CCL20, CCL21, CCL25, CCR3, CCR4, CD16A, CD19, CD20, CD24, CD27, CD28, CD30, CD38, CD39, CD40, CD40L, CD47, CD52, CD70, CD80, CD86, CD123, CD133, CD137, CD137L, CD160, CD272, CEACAM5, CLEC9, CLEC91, CRTH2, CSF-1, CSF-2, CSF-3, CXCL1, CXCL2, CXCL4, CXCL12, CXCL13, CXCR3, cMet, CTLA4, DLL3, DLL4, DNGR-1, E-cadherin, EGFR, ENTPD1, EpCAM, FCER1, FCER1A, FCER2, FGFR, FLAP, FOLH1, Gi24, GITR, GITRL, GPR5, GP100, GPRC5D, HER2, HER3, ICOSL, ICOS, HHLA2, HMGB1, HVEM, IDO, IFNa, IgE, IGF1R, IL2Rbeta, IL1, ILIA, IL1B, IL1F10, IL2, IL4, IL4Ra, IL5, IL5R, IL6, IL7, IL7Ra, IL8, IL9, IL9R, IL10, rhILlO, IL12, IL13, IL13Ra1, IL13Ra2, IL15, IL17, IL17Rb, IL18, IL22, IL23, IL25, IL7, IL33, IL35, ITGB4, ITK, KIR, LAG3, LAMP1, leptin, LPFS2, MHC class II, MUC-1, MUC-16, NCR3LG1, NKG2D, NKp46, NTPDase-1, OX40, OX40L, PD-1, PD-L1, PD-L2, PROM1, 5152, SIRPalpha, SISP1, SLC, SPG64, ST2, STEAP1, STEAP2, Syk kinase, STEAP1, TROP2, TACI, TDO, TGFBETA, T14, TIGIT, TIM3, TLR, TLR2, TLR4, TLR5, TLR9, TMEF1, TNFa, TNFRSF7, Tp55, TREM1, TSLP, TSLPR, TWEAK, VEGF, VISTA, Vstm3, or WUCAM. In some aspects, VL2 and VH2 specifically bind to A2AR, APRIL, ATPDase, BAFF, BAFFR, BCMA, BlyS, BTK, BTLA, B7DC, B7H1, B7H2, B7H3, B7H4, B7H5, B7H6, B7H7, B7RP1, B7-4, C3, C5, CCL2, CCL3, CCL4, CCL5, CCL7, CCL8, CCL11, CCL15, CCL17, CCL19, CCL20, CCL21, CCL25, CCR3, CCR4, CD16A, CD19, CD20, CD24, CD27, CD28, CD30, CD38, CD39, CD40, CD40L, CD47, CD52, CD70, CD80, CD86, CD123, CD133, CD137, CD137L, CD160, CD272, CEACAM5, CLEC9, CLEC91, CRTH2, CSF-1, CSF-2, CSF-3, CXCL1, CXCL2, CXCL4, CXCL12, CXCL13, CXCR3, cMet, CTLA4, DLL3, DLL4, DNGR-1, E-cadherin, EGFR, ENTPD1, EpCAM, FCER1, FCER1A, FCER2, FGFR, FLAP, FOLH1, Gi24, GITR, GITRL, GPR5, GP100, GPRC5D, HER2, HER3, ICOSL, ICOS, HHLA2, HMGB1, HVEM, IDO, IFNa, IgE, IGF1R, IL2Rbeta, IL1, ILIA, IL1B, IL1F10, IL2, IL4, IL4Ra, IL5, IL5R, IL6, IL7, IL7Ra, IL8, IL9, IL9R, IL10, rhILlO, IL12, IL13, IL13Ra1, IL13Ra2, IL15, IL17, IL17Rb, IL18, IL22, IL23, IL25, IL7, IL33, IL35, ITGB4, ITK, KIR, LAG3, LAMP1, leptin, LPFS2, MHC class II, MUC-1, MUC-16, NCR3LG1, NKG2D, NKp46, NTPDase-1, OX40, OX40L, PD-1, PD-L1, PD-L2, PROM1, 5152, SIRPalpha, SISP1, SLC, SPG64, ST2, STEAP1, STEAP2, Syk kinase, STEAP1, TROP2, TACI, TDO, TGFBETA, T14, TIGIT, TIM3, TLR, TLR2, TLR4, TLR5, TLR9, TMEF1, TNFa, TNFRSF7, Tp55, TREM1, TSLP, TSLPR, TWEAK, VEGF, VISTA, Vstm3, or WUCAM. The VL1, VL2, VH1, and/or VH2 may specifically bind to CD28, cMet, Trop2, CD20, or CD19; VL3 and/or VH3 may specifically bind to CD28; and VL4 and/or VH4 may specifically bind to CD3. For example, the antigen binding polypeptide complex may specifically bind CD28, CD3, cMet, and Trop2. For example, the antigen binding polypeptide complex may specifically bind CD28, CD3, CD19, and CD20. For example, VL1 and VH1 may specifically bind to cMet. For example, VL2 and VH2 may specifically bind to cMet. For example, VL1 and VH1 may specifically bind to Trop2. For example, VL2 and VH2 may specifically bind to Trop2. For example, VL1 and VH1 may specifically bind to CD19. For example, VL2 and VH2 may specifically bind to CD19. For example, VL1 and VH1 may specifically bind to CD20. For example, VL2 and VH2 may specifically bind to CD20.

[0200] In some aspects of the antigen binding polypeptide complex described herein, VL4 and VH4 specifically bind to CD3, VL3 and VH3 specifically bind to CD28, VL2 and VH2 specifically bind to Trop2, and VL1 and VH1 specifically bind to cMet. In some aspects, VL4 and VH4 specifically bind to CD3, VL3 and VH3 specifically bind to CD28, VL2 and VH2 specifically bind to cMet, and VL1 and VH1 specifically bind to Trop2. In some aspects, VL4 and VH4 specifically bind to CD3, VL3 and VH3 specifically bind to Trop2, VL2 and VH2 specifically bind to CD28, and VL1 and VH1 specifically bind to cMet. In some aspects, VL4 and VH4 specifically bind to CD3, VL3 and VH3 specifically bind to Trop2, VL2 and VH2 specifically bind to cMet, and VL1 and VH1 specifically bind to CD28. In some aspects, VL4 and VH4 specifically bind to CD3, VL3 and VH3 specifically bind to cMet, VL2 and VH2 specifically bind to Trop2, and VL1 and VH1 specifically bind to CD28. In some aspects, VL4 and VH4 specifically bind to CD3, VL3 and VH3 specifically bind to cMet, VL2 and VH2 specifically bind to Trop2, and VL1 and VH1 specifically bind to CD28. In some aspects, VL4 and VH4 specifically bind to CD3, VL3 and VH3 specifically bind to CD28, VL2 and VH2 specifically bind to CD20, and VL1 and VH1 specifically bind to CD19. In some aspects, VL4 and VH4 specifically bind to CD3, VL3 and VH3 specifically bind to CD28, VL2 and VH2 specifically bind to CD19, and VL1 and VH1 specifically bind to CD20. In some aspects, VL4 and VH4 specifically bind to CD3, VL3 and VH3 specifically bind to CD20, VL2 and VH2 specifically bind to CD28, and VL1 and VH1 specifically bind to CD19. In some aspects, VL4 and VH4 specifically bind to CD3, VL3 and VH3 specifically bind to CD20, VL2 and VH2 specifically bind to CD19, and VL1 and VH1 specifically bind to CD28. In some aspects, VL4 and VH4 specifically bind to CD3, VL3 and VH3 specifically bind to CD19, VL2 and VH2 specifically bind to CD20, and VL1 and VH1 specifically bind to CD28. In some aspects, VL4 and VH4 specifically bind to CD3, VL3 and VH3 specifically bind to CD19, VL2 and VH2 specifically bind to CD28, and VL1 and VH1 specifically bind to CD20.

[0201] In some aspects of the antigen binding polypeptide complex described herein, VL4 and VH4 specifically bind to CD3, VL3 and VH3 specifically bind to CD28, VL2 and VH2 specifically bind to Trop2, and VL1 and VH1 specifically bind to cMet. In some aspects, VL4 and VH4 specifically bind to CD3, VL3 and VH3 specifically bind to CD28, VL2 and VH2 specifically bind to cMet, and VL1 and VH1 specifically bind to Trop2. In some aspects, VL4 and VH4 specifically bind to CD3, VL3 and VH3 specifically bind to Trop2, VL2 and VH2 specifically bind to CD28, and VL1 and VH1 specifically bind to cMet. In some aspects, VL4 and VH4 specifically bind to CD3, VL3 and VH3 specifically bind to Trop2, VL2 and VH2 specifically bind to cMet, and VL1 and VH1 specifically bind to CD28. In some aspects, VL4 and VH4 specifically bind to CD3, VL3 and VH3 specifically bind to cMet, VL2 and VH2 specifically bind to Trop2, and VL1 and VH1 specifically bind to CD28. In some aspects, VL4 and VH4 specifically bind to CD3, VL3 and VH3 specifically bind to cMet, VL2 and VH2 specifically bind to Trop2, and VL1 and VH1 specifically bind to CD28. In some aspects, VL4 and VH4 specifically bind to CD3, VL3 and VH3 specifically bind to CD28, VL2 and VH2 specifically bind to CD20, and VL1 and VH1 specifically bind to CD19. In some aspects, VL4 and VH4 specifically bind to CD3, VL3 and VH3 specifically bind to CD28, VL2 and VH2 specifically bind to CD19, and VL1 and VH1 specifically bind to CD20. In some aspects, VL4 and VH4 specifically bind to CD3, VL3 and VH3 specifically bind to CD20, VL2 and VH2 specifically bind to CD28, and VL1 and VH1 specifically bind to CD19. In some aspects, VL4 and VH4 specifically bind to CD3, VL3 and VH3 specifically bind to CD20, VL2 and VH2 specifically bind to CD19, and VL1 and VH1 specifically bind to CD28. In some aspects, VL4 and VH4 specifically bind to CD3, VL3 and VH3 specifically bind to CD19, VL2 and VH2 specifically bind to CD20, and VL1 and VH1 specifically bind to CD28. In some aspects, VL4 and VH4 specifically bind to CD3, VL3 and VH3 specifically bind to CD19, VL2 and VH2 specifically bind to CD28, and VL1 and VH1 specifically bind to CD20.

[0202] In some aspects, an antigen binding polypeptide complex comprises a first polypeptide, a second polypeptide, and a third polypeptide; wherein the first polypeptide has a structure represented by VL1-L1-CL; VL1-L1-CH1; VH1-L1-CL; or VH1-L1-CH1; wherein the second polypeptide has a structure represented by VH1-L2-CH1-L3-Fc; VH1-L2-CL-L3-Fc; VL1-L2-CH1-L3-Fc; or VL1-L2-CL-L3-Fc; wherein the third polypeptide has a structure represented by VL2-L4-VL3-L5-VH3-L6-VH2-L7-Fc; VL2-L4-VH3-L5-VL3-L6-VH2-L7-Fc; VH2-L4-VL3-L5-VH3-L6-VL2-L7-Fc; or VH2-L4-VH3-L5-VL3-L6-VL2-L7-Fc; wherein VL1 is a first immunoglobulin light chain variable region that specifically binds to A2AR, APRIL, ATPDase, BAFF, BAFFR, BCMA, BlyS, BTK, BTLA, B7DC, B7H1, B7H2, B7H3, B7H4, B7H5, B7H6, B7H7, B7RP1, B7-4, C3, C5, CCL2, CCL3, CCL4, CCL5, CCL7, CCL8, CCL11, CCL15, CCL17, CCL19, CCL20, CCL21, CCL25, CCR3, CCR4, CD16A, CD19, CD20, CD24, CD27, CD28, CD30, CD38, CD39, CD40, CD40L, CD47, CD52, CD70, CD80, CD86, CD123, CD133, CD137, CD137L, CD160, CD272, CEACAM5, CLEC9, CLEC91, CRTH2, CSF-1, CSF-2, CSF-3, CXCL1, CXCL2, CXCL4, CXCL12, CXCL13, CXCR3, cMet, CTLA4, DLL3, DLL4, DNGR-1, E-cadherin, EGFR, ENTPD1, EpCAM, FCER1, FCER1A, FCER2, FGFR, FLAP, FOLH1, Gi24, GITR, GITRL, GPR5, GP100, GPRC5D, HER2, HER3, ICOSL, ICOS, HHLA2, HMGB1, HVEM, IDO, IFNa, IgE, IGF1R, IL2Rbeta, IL1, ILIA, IL1B, IL1F10, IL2, IL4, IL4Ra, IL5, IL5R, IL6, IL7, IL7Ra, IL8, IL9, IL9R, IL10, rhILlO, IL12, IL13, IL13Ra1, IL13Ra2, IL15, IL17, IL17Rb, IL18, IL22, IL23, IL25, IL7, IL33, IL35, ITGB4, ITK, KIR, LAG3, LAMP1, leptin, LPFS2, MHC class II, MUC-1, MUC-16, NCR3LG1, NKG2D, NKp46, NTPDase-1, OX40, OX40L, PD-1, PD-L1, PD-L2, PROM1, S152, SIRPalpha, SISP1, SLC, SPG64, ST2, STEAP1, STEAP2, Syk kinase, STEAP1, TROP2, TACI, TDO, TGFBETA, T14, TIGIT, TIM3, TLR, TLR2, TLR4, TLR5, TLR9, TMEF1, TNFa, TNFRSF7, Tp55, TREM1, TSLP, TSLPR, TWEAK, VEGF, VISTA, Vstm3, or WUCAM; VL2 is a second immunoglobulin light chain variable region that specifically binds to CD3; VL3 is a third immunoglobulin light chain variable region that specifically binds to A2AR, APRIL, ATPDase, BAFF, BAFFR, BCMA, BlyS, BTK, BTLA, B7DC, B7H1, B7H2, B7H3, B7H4, B7H5, B7H6, B7H7, B7RP1, B7-4, C3, C5, CCL2, CCL3, CCL4, CCL5, CCL7, CCL8, CCL11, CCL15, CCL17, CCL19, CCL20, CCL21, CCL25, CCR3, CCR4, CD16A, CD19, CD20, CD24, CD27, CD28, CD30, CD38, CD39, CD40, CD40L, CD47, CD52, CD70, CD80, CD86, CD123, CD133, CD137, CD137L, CD160, CD272, CEACAM5, CLEC9, CLEC91, CRTH2, CSF-1, CSF-2, CSF-3, CXCL1, CXCL2, CXCL4, CXCL12, CXCL13, CXCR3, cMet, CTLA4, DLL3, DLL4, DNGR-1, E-cadherin, EGFR, ENTPD1, EpCAM, FCER1, FCER1A, FCER2, FGFR, FLAP, FOLH1, Gi24, GITR, GITRL, GPR5, GP100, GPRC5D, HER2, HER3, ICOSL, ICOS, HHLA2, HMGB1, HVEM, IDO, IFNa, IgE, IGF1R, IL2Rbeta, IL1, ILIA, IL1B, IL1F10, IL2, IL4, IL4Ra, IL5, IL5R, IL6, IL7, IL7Ra, IL8, IL9, IL9R, IL10, rhILlO, IL12, IL13, IL13Ra1, IL13Ra2, IL15, IL17, IL17Rb, IL18, IL22, IL23, IL25, IL7, IL33, IL35, ITGB4, ITK, KIR, LAG3, LAMP1, leptin, LPFS2, MHC class II, MUC-1, MUC-16, NCR3LG1, NKG2D, NKp46, NTPDase-1, OX40, OX40L, PD-1, PD-L1, PD-L2, PROM1, 5152, SIRPalpha, SISP1, SLC, SPG64, ST2, STEAP1, STEAP2, Syk kinase, STEAP1, TROP2, TACI, TDO, TGFBETA, T14, TIGIT, TIM3, TLR, TLR2, TLR4, TLR5, TLR9, TMEF1, TNFa, TNFRSF7, Tp55, TREM1, TSLP, TSLPR, TWEAK, VEGF, VISTA, Vstm3, or WUCAM; VH1 is a first immunoglobulin heavy chain variable region that specifically binds to A2AR, APRIL, ATPDase, BAFF, BAFFR, BCMA, BlyS, BTK, BTLA, B7DC, B7H1, B7H2, B7H3, B7H4, B7H5, B7H6, B7H7, B7RP1, B7-4, C3, C5, CCL2, CCL3, CCL4, CCL5, CCL7, CCL8, CCL11, CCL15, CCL17, CCL19, CCL20, CCL21, CCL25, CCR3, CCR4, CD16A, CD19, CD20, CD24, CD27, CD28, CD30, CD38, CD39, CD40, CD40L, CD47, CD52, CD70, CD80, CD86, CD123, CD133, CD137, CD137L, CD160, CD272, CEACAM5, CLEC9, CLEC91, CRTH2, CSF-1, CSF-2, CSF-3, CXCL1, CXCL2, CXCL4, CXCL12, CXCL13, CXCR3, cMet, CTLA4, DLL3, DLL4, DNGR-1, E-cadherin, EGFR, ENTPD1, EpCAM, FCER1, FCER1A, FCER2, FGFR, FLAP, FOLH1, Gi24, GITR, GITRL, GPR5, GP100, GPRC5D, HER2, HER3, ICOSL, ICOS, HHLA2, HMGB1, HVEM, IDO, IFNa, IgE, IGF1R, IL2Rbeta, IL1, ILIA, IL1B, IL1F10, IL2, IL4, IL4Ra, IL5, IL5R, IL6, IL7, IL7Ra, IL8, IL9, IL9R, IL10, rhILlO, IL12, IL13, IL13Ra1, IL13Ra2, IL15, IL17, IL17Rb, IL18, IL22, IL23, IL25, IL7, IL33, IL35, ITGB4, ITK, KIR, LAG3, LAMP1, leptin, LPFS2, MHC class II, MUC-1, MUC-16, NCR3LG1, NKG2D, NKp46, NTPDase-1, OX40, OX40L, PD-1, PD-L1, PD-L2, PROM1, S152, SIRPalpha, SISP1, SLC, SPG64, ST2, STEAP1, STEAP2, Syk kinase, STEAP1, TROP2, TACI, TDO, TGFBETA, T14, TIGIT, TIM3, TLR, TLR2, TLR4, TLR5, TLR9, TMEF1, TNFa, TNFRSF7, Tp55, TREM1, TSLP, TSLPR, TWEAK, VEGF, VISTA, Vstm3, or WUCAM; VH2 is a second immunoglobulin heavy chain variable region that specifically binds to CD3; VH3 is a third immunoglobulin heavy chain variable region that specifically binds to A2AR, APRIL, ATPDase, BAFF, BAFFR, BCMA, BlyS, BTK, BTLA, B7DC, B7H1, B7H2, B7H3, B7H4, B7H5, B7H6, B7H7, B7RP1, B7-4, C3, C5, CCL2, CCL3, CCL4, CCL5, CCL7, CCL8, CCL11, CCL15, CCL17, CCL19, CCL20, CCL21, CCL25, CCR3, CCR4, CD16A, CD19, CD20, CD24, CD27, CD28, CD30, CD38, CD39, CD40, CD40L, CD47, CD52, CD70, CD80, CD86, CD123, CD133, CD137, CD137L, CD160, CD272, CEACAM5, CLEC9, CLEC91, CRTH2, CSF-1, CSF-2, CSF-3, CXCL1, CXCL2, CXCL4, CXCL12, CXCL13, CXCR3, cMet, CTLA4, DLL3, DLL4, DNGR-1, E-cadherin, EGFR, ENTPD1, EpCAM, FCER1, FCER1A, FCER2, FGFR, FLAP, FOLH1, Gi24, GITR, GITRL, GPR5, GP100, GPRC5D, HER2, HER3, ICOSL, ICOS, HHLA2, HMGB1, HVEM, IDO, IFNa, IgE, IGF1R, IL2Rbeta, IL1, ILIA, IL1B, IL1F10, IL2, IL4, IL4Ra, IL5, IL5R, IL6, IL7, IL7Ra, IL8, IL9, IL9R, IL10, rhILlO, IL12, IL13, IL13Ra1, IL13Ra2, IL15, IL17, IL17Rb, IL18, IL22, IL23, IL25, IL7, IL33, IL35, ITGB4, ITK, KIR, LAG3, LAMP1, leptin, LPFS2, MHC class II, MUC-1, MUC-16, NCR3LG1, NKG2D, NKp46, NTPDase-1, OX40, OX40L, PD-1, PD-L1, PD-L2, PROM1, S152, SIRPalpha, SISP1, SLC, SPG64, ST2, STEAP1, STEAP2, Syk kinase, STEAP1, TROP2, TACI, TDO, TGFBETA, T14, TIGIT, TIM3, TLR, TLR2, TLR4, TLR5, TLR9, TMEF1, TNFa, TNFRSF7, Tp55, TREM1, TSLP, TSLPR, TWEAK, VEGF, VISTA, Vstm3, or WUCAM; Fc is a region comprising an immunoglobulin heavy chain constant region 2 (CH2), an immunoglobulin heavy chain constant region 3 (CH3), and optionally, an immunoglobulin hinge; and L1-L7 are amino acid linkers. For example, the antigen binding polypeptide complex may specifically bind one or more of CD20, CD3 and CD28. For example, the antigen binding polypeptide complex may specifically bind CD20 and CD3. For example, the antigen binding polypeptide complex may specifically bind to CD20, CD3 and CD28. For example, VH1 and VL1 may specifically bind to CD20. For example, VH2 and VL2 may specifically bind to CD3. For example, VH2 and VL2 may specifically bind to CD28. For example, VH3 and VL3 may specifically bind to CD28. For example, VH3 and VL3 may specifically bind to CD20. For example, VH3 and VL3 may specifically bind to CD3. For example, VH1 and VL1 may specificially bind to CD20, VH2 and VL2 may specifically bind to CD3, and VH3 and VL3 may specifically bind to CD20. For example, VH1 and VL1 may specificially bind to CD20, VH2 and VL2 may specifically bind to CD3, and VH3 and VL3 may specifically bind to CD28. For example, VH1 and VL1 may specificially bind to CD20, VH2 and VL2 may specifically bind to CD28, and VH3 and VL3 may specifically bind to CD3.

[0203] For the avoidance of doubt, all the antigen binding polypeptide complex structures described herein can be combined with any one or more of the targets described herein. Any and all disclosure herein in relation to targets for antigen binding polypeptide complexs of the invention is generally applicable, and applies equally and without reservation to each and every antigen binding polypeptide complex described herein. For the avoidance of doubt, the VL1, VL2, VL3, VL4, VH1, VH2, VH3, and/or VH4 of each and every antigen binding polypeptide complex described herein may independently bind to any one of said particularly preferred targets.

[0204] In some aspects, an antigen binding polypeptide complex (e.g., an antibody or antigen binding fragment thereof) comprises an immunoglobulin hinge. In some aspects, the immunoglobulin hinge comprises an upper hinge region, a middle hinge region, a lower hinge region, or a combination thereof.

[0205] As used herein, an antigen binding polypeptide complex (e.g., an antibody or antigen binding fragment thereof), or region or domain thereof that “specifically binds” refers to its association with an epitope by its antigen binding domain, and that the binding entails some complementarity between the antigen binding domain and the epitope. Specific binding to an epitope occurs where there is binding to that epitope via its antigen binding domain more readily than there would be binding to a random, unrelated epitope.

[0206] As used herein, an “epitope” refers to a localized region of an antigen to which an antigen binding polypeptide complex (e.g., antibody or antigen binding fragment thereof) can specifically bind. An epitope can be, for example, contiguous amino acids of a polypeptide (linear or contiguous epitope) or an epitope can, for example, come together from two or more non-contiguous regions of a polypeptide or polypeptides (conformational, non-linear, discontinuous, or non-contiguous epitope). In some aspects, the epitope to which an antibody or antigen-binding fragment thereof binds can be determined by, e.g., NMR spectroscopy, X-ray diffraction crystallography studies, ELISA assays, hydrogen/deuterium exchange coupled with mass spectrometry (e.g., liquid chromatography electrospray mass spectrometry), array-based oligo-peptide scanning assays, and/or mutagenesis mapping (e.g., site-directed mutagenesis mapping). See, e.g., Giege R et al., (1994) Acta Crystallogr D Biol Crystallogr 50(Pt 4): 339-350; McPherson A (1990) Eur J Biochem 189: 1-23; Chayen N E (1997) Structure 5: 1269-1274; McPherson A (1976) J Biol Chem 251: 6300-6303; Meth Enzymol (1985) volumes 114 & 115, eds Wyckoff H W et al., U.S. Pub. No. 2004/0014194), Bricogne G (1993) Acta Crystallogr D Biol Crystallogr 49(Pt 1): 37-60, Bricogne G (1997) Meth Enzymol 276A: 361-423, ed Carter C W, and Roversi et al., (2000) Acta Crystallogr D Biol Crystallogr 56(Pt 10): 1316-1323 (X-ray diffraction crystallography studies); and Champe et al., (1995) J Biol Chem 270: 1388-1394 and Cunningham B C & Wells J A (1989) Science 244: 1081-1085 (mutagenesis mapping).

[0207] Specific binding can be represented by a “binding affinity.” Binding affinity refers to an intrinsic binding affinity which reflects a 1:1 interaction between members of a binding pair (e.g., an antigen binding polypeptide complex and an antigen). Binding affinity can be measured and/or expressed in several ways known in the art, including, but not limited to, equilibrium dissociation constant (K_{D}). K_{D} is calculated from the quotient of k_{off}/kₒₙ, where kₒₙ refers to the association rate constant of, e.g., an antigen binding polypeptide complex to an antigen, and k_{off} refers to the dissociation of, e.g., an antigen binding polypeptide complex from an antigen. The kₒₙ and k_{off} can be determined by techniques known to one of ordinary skill in the art, such as Octet BLI, BIAcore® or KinExA.

[0208] Accordingly, in some aspects, an antigen binding polypeptide complex of the invention is an antibody or antigen binding fragment thereof.

[0209] In some aspects, the antibody or antigen binding fragment thereof specifically binds to an antigen with an equilibrium dissociation constant (K_{D}) of from about 10 μM to about 1 pM. In some aspects, the antibody is IgG, IgM, IgE, IgA or IgD. For example, the antibody may be IgG. For example, the antibody may be IgM. For example, the antibody may be IgE. For example, the antibody may be IgA. For example, the antibody may be IgD. In some aspects, the IgG is IgG1, IgG2, IgG3 or IgG4. For example, the antibody may be IgG1. For example, the antibody may be IgG2. For example, the antibody may be IgG3. For example, the antibody may be IgG4. In some aspects, the antigen binding fragment is a Fab, scFab, Fab′, F(ab′)2, Fv or scFv. For example, the antigen binding fragment may be a Fab. For example, the antigen binding fragment may be a scFab. For example, the antigen binding fragment may be a Fab′. For example, the antigen binding fragment may be a F(ab′)2. For example, the antigen binding fragment may be a Fv. For example, the antigen binding fragment may be a scFv. In some aspects, the antibody is human or humanized. For example, the antibody may be human. For the example, the antibody may be humanized.

[0210] In some aspects, an antigen binding polypeptide complex of the invention (e.g., an antibody or antigen binding fragment thereof) is bivalent, trivalent, tetravalent, pentavalent or hexavalent.

### Amino Acid Linkers

[0211] In some aspects, an antigen binding polypeptide complex (e.g., an antibody or antigen binding fragment thereof) of the invention comprises one or more amino acid linkers between one or more regions of the antigen binding polypeptide complex.

[0212] As used herein, an “amino acid linker” refers to a single amino acid or short amino acid sequence that is capable of joining two polypeptide regions of the invention described herein in a stable manner that maintains or promotes a function associated with the polypeptide regions. In some aspects, an amino acid linker is represented herein in a structure of an antigen binding polypeptide complex by the abbreviation “1” or “L” and a number (e.g., L1 to denote a first linker, L2 to denote a second linker, L3 to denote a third linker, L4 to denote a fourth linker, L5 to denote a fifth linker, L6 to denote a sixth linker, L7 to denote a seventh linker, L8 to denote an eighth linker, and so on). In some aspects, such enumerated amino acid linkers (e.g., L1) can have the same or different sequence as any other enumerated amino acid linker (e.g., L2, etc.). Furthermore, in some aspects, an enumerated amino acid linker present in one polypeptide (e.g., L1 on a first polypeptide of an antigen binding polypeptide complex structure described herein) can have the same or different sequence as the same enumerated amino acid linker present in another polypeptide (e.g., L1 on a second polypeptide, third polypeptide, etc. of an antigen binding polypeptide complex structure described herein).

[0213] In some aspects, an amino acid linker has a length of from 0 amino acids (i.e., an amino acid linker is not present) to about 50 amino acids (e.g., one or more of L1, L2, L3, L4, L5, L6, L7, L8, L9, L10, L11, L12, L13, L14, L15, L16, L17, L18, L19, L20, etc. of a first, second, third, fourth, etc. polypeptide of an antigen binding polypeptide complex structure described herein). In some aspects, the amino acid linker has a length of from 0 amino acids to about 45 amino acids, 0 amino acids to about 40 amino acids, 0 amino acids to about 35 amino acids, 0 amino acids to about 30 amino acids, 0 amino acids to about 25 amino acids, 0 amino acids to about 20 amino acids, 0 amino acids to about 15 amino acids, 0 amino acids to about 10 amino acids, 0 amino acids to about 5 amino acids, about 1 amino acid to about 45 amino acids, about 1 amino acid to about 40 amino acids, about 1 amino acid to about 35 amino acids, about 1 amino acid to about 30 amino acids, about 1 amino acid to about 25 amino acids, about 1 amino acid to about 20 amino acids, 1 amino acid to about 15 amino acids, about 1 amino acid to about 10 amino acids, about 1 amino acid to about 5 amino acids, about 5 amino acids to about 50 amino acids, about 5 amino acids to about 45 amino acids, about 5 amino acids to about 40 amino acids, about 5 amino acids to about 35 amino acids, about 5 amino acids to about 30 amino acids, about 5 amino acids to about 25 amino acids, about 5 amino acids to about 20 amino acids, about 5 amino acids to about 15 amino acids, about 5 amino acids to about 10 amino acids, about 10 amino acids to about 50 amino acids, about 10 amino acids to about 45 amino acids, about 10 amino acids to about 40 amino acids, about 10 amino acids to about 35 amino acids, about 10 amino acids to about 30 amino acids, about 10 amino acids to about 25 amino acids, about 10 amino acids to about 20 amino acids, about 10 amino acids to about 15 amino acids, about 15 amino acids to about 50 amino acids, about 15 amino acids to about 45 amino acids, about 15 amino acids to about 40 amino acids, about 15 amino acids to about 35 amino acids, about 15 amino acids to about 30 amino acids, about 15 amino acids to about 25 amino acids, about 15 amino acids to about 20 amino acids, about 20 amino acids to about 50 amino acids, about 20 amino acids to about 45 amino acids, about 20 amino acids to about 40 amino acids, about 20 amino acids to about 35 amino acids, about 20 amino acids to about 30 amino acids, about 20 amino acids to about 25 amino acids, about 25 amino acids to about 50 amino acids, about 25 amino acids to about 45 amino acids, about 25 amino acids to about 40 amino acids, about 25 amino acids to about 35 amino acids, about 25 amino acids to about 30 amino acids, about 30 amino acids to about 50 amino acids, about 30 amino acids to about 45 amino acids, about 30 amino acids to about 40 amino acids, about 30 amino acids to about 35 amino acids, about 40 amino acids to about 50 amino acids, about 40 amino acids to about 45 amino acids, or about 45 amino acids to about 50 amino acids.

[0214] In some aspects, the amino acid linker has 0 amino acids (i.e., an amino acid linker is not present) or about 1, about 2, about 3, about 4, about 5, about 6, about 7, about 8, about 9, about 10, about 11, about 12, about 13, about 14, about 15, about 16, about 17, about 18, about 19, about 20, about 25, about 30, about 35, about 40, about 45, or about 50 amino acids (e.g., one or more of L1, L2, L3, L4, L5, L6, L7, L8, L9, L10, L11, L12, L13, L14, L15, L16, L17, L18, L19, L20, etc. of a first, second, third, fourth, etc. polypeptide of an antigen binding polypeptide complex structure described herein).

[0215] In some aspects, the amino acid linker consists of one or more amino acid residues (e.g., one or more of L1, L2, L3, L4, L5, L6, L7, L8, L9, L10, L11, L12, L13, L14, L15, L16, L17, L18, L19, L20, etc. of a first, second, third, fourth, etc. polypeptide of an antigen binding polypeptide complex structure described herein). In some aspects, the amino acid residues are selected from the group consisting of glycine, alanine, serine, threonine, cysteine, asparagine, glutamine, leucine, isoleucine, valine, proline, histidine, aspartic acid, glutamic acid, lysine, arginine, methionine, phenylalanine, tryptophan, and tyrosine.

[0216] In some aspects, an amino acid linker of the invention is non-immunogenic. In some aspects, the non-immunogenic linker consists of serine, glycine and/or alanine residues, or consists of serine and/or glycine residues. In some aspects, an amino acid linker of the invention does not contain a T cell epitope or consensus T cell epitope.

[0217] In some aspects, the amino acid linker consists of one or more residues of alanine, cysteine, glycine, isoleucine, leucine, methionine, phenylalanine, proline, tryptophan, tyrosine, valine (e.g., one or more of L1, L2, L3, L4, L5, L6, L7, L8, L9, L10, L11, L12, L13, L14, L15, L16, L17, L18, L19, L20, etc. of a first, second, third, fourth, etc. polypeptide of an antigen binding polypeptide complex structure described herein).

[0218] Amino acid linker sequences that can be used with the antigen binding polypeptide complexes (e.g., an antibody or antigen binding fragment thereof) of the invention are well known and can be incorporated into antigen binding polypeptide complexes of the invention using routine molecular biology and recombinant DNA techniques. See, e.g., Chen et al., Adv Drug Deliv Rev., 65(10):1357-1369, 2013; and Chichili et al., Protein Sci., 22(2):153-167, 2013.

[0219] In some aspects, the amino acid linker (e.g., one or more of L1, L2, L3, L4, L5, L6, L7, L8, L9, L10, L11, L12, L13, L14, L15, L16, L17, L18, L19, L20, etc. of a first, second, third, fourth, etc. polypeptide of an antigen binding polypeptide complex structure described herein) has the sequence of g, a, gss, asg, ggssg, ggsgs, gssgs, gtvaa, asggs, astgg, asggsg, ggsgssg, ggsggssgss, sggsgssggs, ggsggsgsgggsasgsg, ggsggsgsggggsasgsg, gggssggggsggsgsggsgs, ggggsggsgsggggsasgsg, gggssggsgsggsgsggsgs, sggssggsgsggsgsggsgssg, gsgssggggsggsgsggsgssg, ggggsgsggsgggssggggsggggsggggsggggsggggs, ggggsggggsggggsggggsggggsggggsggggsggggs, ggggsgsggsgggssggggsggggsggggsggggsggggssss, or ggggsgsggsgggssggggsggggsggggsggggsggggssssgs (SEQ ID NOs:1-21), the sequence of any one of SEQ ID NOs:444, 567, 576 (GGS) and 607, or a sequence having at least 50%, at least 60%, at least 70%, at least 80%, at least 90%, at least 91%, at least 92%, at least 93%, at least 94%, at least 95%, at least 96%, at least 97%, at least 98%, at least 99% or 100% identity to any one of SEQ ID NOs:1-21 and SEQ ID NOs:444, 567, 576 (GGS) and 607.

[0220] In some aspects, an amino acid linker of an antigen binding polypeptide complex described herein (e.g., an antibody or an antibody or antigen binding fragment thereof) is a cleavable linker. As used herein a “cleavable linker” is an amino acid linker that can connect two or more polypeptides together and then can be cleaved once exposed to, for example, an enzyme, photo-irradiation, or chemical reagent. In some aspects, the enzyme is present at the site of a tumor.

[0221] In some aspects, the cleavable linker is cleaved by a matrix metalloproteinase (MMP). In some aspects, the cleavable linker is cleaved by a type II transmembrane serine protease.

[0222] In some aspects, the cleavable linker (e.g., one or more of L1, L2, L3, L4, L5, L6, L7, L8, L9, L10, L11, L12, L13, L14, L15, L16, L17, L18, L19, L20, etc. of a first, second, third, fourth, etc. polypeptide of an antigen binding polypeptide complex structure described herein) has the amino acid sequence of GPAALV, GSGRKG, GPLGLTG, GPSGLVG, GLVGRKAG, GPAGLVG, GPAGLVSG, STRKAGG, ASTRKAG, or ASTRKAGG (SEQ ID NOs:22-31), or a sequence having at least 50%, at least 60%, at least 70%, at least 80%, at least 90%, at least 91%, at least 92%, at least 93%, at least 94%, at least 95% at least 96%, at least 97%, at least 98%, at least 99% or 100% identity to any one of SEQ ID NOs:22-31.

[0223] In some aspects of an antigen binding polypeptide complex described herein, L5, L8, or L5 and L8 are cleavable linkers. In some aspects, VH3 and VL3 of the antigen binding polypeptide complex specifically bind to CD3. In some aspects, VH1, VL1, VH2 and VL2 of the antigen binding polypeptide complex specifically bind to a TAA. In some aspects, VH1 and VL1 specifically bind to a TAA, and VH2 and VL2 specifically bind to a TAA.

[0224] In some aspects of an antigen binding polypeptide complex described herein, L4, L7, or L4 and L7 are cleavable linkers. In some aspects, VH3 and VL3 of an antigen binding polypeptide complex described herein specifically bind to CD3. In some aspects, VH1, VL1, VH2 and VL2 of the antigen binding polypeptide complex specifically bind to a TAA. In some aspects, VH1 and VL1 of the antigen binding polypeptide complex specifically bind to a TAA, and VH2 and VL2 specifically bind to a TAA.

[0225] In some aspects of an antigen binding polypeptide complex described herein, L9, L12, or L9 and L12 are cleavable linkers. In some aspects, VH4 and VL4 of the antigen binding polypeptide complex specifically bind to CD3. In some aspects, VH1, VL1, VH2, VL2, VH3 and VL3 specifically bind to a TAA. In some aspects, VH1 and VL1 specifically bind to a TAA, VH2 and VL2 specifically bind to a TAA, and VH3 and VL3 specifically bind to CD28. In some aspects, VH1 and VL1 specifically bind to CD28, VH2 and VL2 specifically bind to a TAA, and VH3 and VL3 specifically bind to a TAA. In some aspects, VH1 and VL1 specifically bind to cMet, VH2 and VL2 specifically bind to Trop2, and VH3 and VL3 specifically bind to CD28. In some aspects, VH1 and VL1 specifically bind to Trop2, VH2 and VL2 specifically bind to cMet, and VH3 and VL3 specifically bind to CD28. In some aspects, VH1 and VL1 specifically bind to cMet, VH2 and VL2 specifically bind to CD28, and VH3 and VL3 specifically bind to Trop2. In some aspects, VH1 and VL1 specifically bind to CD28, VH2 and VL2 specifically bind to cMet, and VH3 and VL3 specifically bind to Trop2. In some aspects, VH1 and VL1 specifically bind to Trop2, VH2 and VL2 specifically bind to CD28, and VH3 and VL3 specifically bind to cMet. In some aspects, VH1 and VL1 specifically bind to CD28, VH2 and VL2 specifically bind to Trop2, and VH3 and VL3 specifically bind to cMet. In some aspects, VH1 and VL1 specifically bind to CD20, VH2 and VL2 specifically bind to CD19, and VH3 and VL3 specifically bind to CD28. In some aspects, VH1 and VL1 specifically bind to CD19, VH2 and VL2 specifically bind to CD20, and VH3 and VL3 specifically bind to CD28. In some aspects, VH1 and VL1 specifically bind to CD20, VH2 and VL2 specifically bind to CD28, and VH3 and VL3 specifically bind to CD19. In some aspects, VH1 and VL1 specifically bind to CD28, VH2 and VL2 specifically bind to CD20, and VH3 and VL3 specifically bind to CD19. In some aspects, VH1 and VL1 specifically bind to CD19, VH2 and VL2 specifically bind to CD28, and VH3 and VL3 specifically bind to CD20. In some aspects, VH1 and VL1 specifically bind to CD28, VH2 and VL2 specifically bind to CD19, and VH3 and VL3 specifically bind to CD20.

[0226] In some aspects of an antigen binding polypeptide complex described herein, L1, L3, or L1 and L3 are cleavable linkers, or L5, L7, or L5 and L7 are cleavable linkers. In some aspects of an antigen binding polypeptide complex described herein, L9, L11, or L9 and L11 are cleavable linkers, or L13, L15, or L13 and L15 are cleavable linkers. In some aspects, VH1 and VL1, VH2 and VL2, VH3 and VL3, or VH4 and VL4 of the antigen binding polypeptide complex specifically bind to CD3. In some aspects, one or more of VH1 and VL1, VH2 and VL2, VH3 and VL3, and VH4 and VL4 specifically bind to a TAA.

[0227] In some aspects, VH1 and VH2 of an antigen binding polypeptide complex described herein are joined by a cleavable linker. In some aspects, VH1 and VL2 of an antigen binding polypeptide complex described herein are joined by a cleavable linker. In some aspects, VL1 and VH2 of an antigen binding polypeptide complex described herein are joined by a cleavable linker. In some aspects, VL1 and VL2 of an antigen binding polypeptide complex described herein are joined by a cleavable linker. In some aspects, VH1 and VH2 of an antigen binding polypeptide complex described herein are joined by a noncleavable linker having the amino acid sequence of GS (GS linker). In some aspects, VH1 and VL2 of an antigen binding polypeptide complex described herein are joined by a GS linker. In some aspects, VL1 and VH2 of an antigen binding polypeptide complex described herein are joined by a GS linker. In some aspects, VL1 and VL2 of an antigen binding polypeptide complex described herein are joined by a GS linker.

[0228] In some aspects, VL2 and VL1 of an antigen binding polypeptide complex described herein are joined by a cleavable linker. In some aspects, VH2 and VL1 of an antigen binding polypeptide complex described herein are joined by a cleavable linker. In some aspects, VL2 and VH1 of an antigen binding polypeptide complex described herein are joined by a cleavable linker. In some aspects, VH2 and VH1 of an antigen binding polypeptide complex described herein are joined by a cleavable linker. In some aspects, VL2 and VL1 of an antigen binding polypeptide complex described herein are joined by a GS linker. In some aspects, VH2 and VL1 of an antigen binding polypeptide complex described herein are joined by a GS linker. In some aspects, VL2 and VH1 of an antigen binding polypeptide complex described herein are joined by a GS linker. In some aspects, VH2 and VH1 of an antigen binding polypeptide complex described herein are joined by a GS linker.

[0229] In some aspects, VH3 and VH4 of an antigen binding polypeptide complex described herein are joined by a cleavable linker. In some aspects, VH3 and VL4 of an antigen binding polypeptide complex described herein are joined by a cleavable linker. In some aspects, VL3 and VH4 of an antigen binding polypeptide complex described herein are joined by a cleavable linker. In some aspects, VL3 and VL4 of an antigen binding polypeptide complex described herein are joined by a cleavable linker. In some aspects, VH3 and VH4 of an antigen binding polypeptide complex described herein are joined by a GS linker. In some aspects, VH3 and VL4 of an antigen binding polypeptide complex described herein are joined by a GS linker. In some aspects, VL3 and VH4 of an antigen binding polypeptide complex described herein are joined by a GS linker. In some aspects, VL3 and VL4 of an antigen binding polypeptide complex described herein are joined by a GS linker.

[0230] In some aspects, VL4 and VL3 of an antigen binding polypeptide complex described herein are joined by a cleavable linker. In some aspects, VH4 and VL3 of an antigen binding polypeptide complex described herein are joined by a cleavable linker. In some aspects, VL4 and VH3 of an antigen binding polypeptide complex described herein are joined by a cleavable linker. In some aspects, VH4 and VH3 of an antigen binding polypeptide complex described herein are joined by a cleavable linker. In some aspects, VL4 and VL3 of an antigen binding polypeptide complex described herein are joined by a GS linker. In some aspects, VH4 and VL3 of an antigen binding polypeptide complex described herein are joined by a GS linker. In some aspects, VL4 and VH3 of an antigen binding polypeptide complex described herein are joined by a GS linker. In some aspects, VH4 and VH3 of an antigen binding polypeptide complex described herein are joined by a GS linker.

[0231] In some aspects, VH1 and VH2 of an antigen binding polypeptide complex described herein are joined by a cleavable linker, and VL2 and VL1 of an antigen binding polypeptide complex described herein are joined by a GS linker. In some aspects, VH1 and VL2 of an antigen binding polypeptide complex described herein are joined by a cleavable linker, and VH2 and VL1 of an antigen binding polypeptide complex described herein are joined by a GS linker. In some aspects, VL1 and VH2 of an antigen binding polypeptide complex described herein are joined by a cleavable linker, and VL2 and VH1 of an antigen binding polypeptide complex described herein are joined by a GS linker. In some aspects, VL1 and VL2 of an antigen binding polypeptide complex described herein are joined by a cleavable linker, and VH2 and VH1 of an antigen binding polypeptide complex described herein are joined by a GS linker. In some aspects, VH1 and VH2 of an antigen binding polypeptide complex described herein are joined by a GS linker, and VL2 and VL1 of an antigen binding polypeptide complex described herein are joined by a cleavable linker. In some aspects, VH1 and VL2 of an antigen binding polypeptide complex described herein are joined by a GS linker, and VH2 and VL1 of an antigen binding polypeptide complex described herein are joined by a cleavable linker. In some aspects, VL1 and VH2 of an antigen binding polypeptide complex described herein are joined by a GS linker, and VL2 and VH1 of an antigen binding polypeptide complex described herein are joined by a cleavable linker. In some aspects, VL1 and VL2 of an antigen binding polypeptide complex described herein are joined by a GS linker, and VH2 and VH1 of an antigen binding polypeptide complex described herein are joined by a cleavable linker.

[0232] In some aspects, VH3 and VH4 of an antigen binding polypeptide complex described herein are joined by a cleavable linker, and VL4 and VL3 of an antigen binding polypeptide complex described herein are joined by a GS linker. In some aspects, VH3 and VL4 of an antigen binding polypeptide complex described herein are joined by a cleavable linker, and VH4 and VL3 of an antigen binding polypeptide complex described herein are joined by a GS linker. In some aspects, VL3 and VH4 of an antigen binding polypeptide complex described herein are joined by a cleavable linker, and VL4 and VH3 of an antigen binding polypeptide complex described herein are joined by a GS linker. In some aspects, VL3 and VL4 of an antigen binding polypeptide complex described herein are joined by a cleavable linker, and VH4 and VH3 of an antigen binding polypeptide complex described herein are joined by a GS linker. In some aspects, VH3 and VH4 of an antigen binding polypeptide complex described herein are joined by a GS linker, and VL4 and VL3 of an antigen binding polypeptide complex described herein are joined by a cleavable linker. In some aspects, VH3 and VL4 of an antigen binding polypeptide complex described herein are joined by a GS linker, and VH4 and VL3 of an antigen binding polypeptide complex described herein are joined by a cleavable linker. In some aspects, VL3 and VH4 of an antigen binding polypeptide complex described herein are joined by a GS linker, and VL4 and VH3 of an antigen binding polypeptide complex described herein are joined by a cleavable linker. In some aspects, VL3 and VL4 of an antigen binding polypeptide complex described herein are joined by a GS linker, and VH4 and VH3 of an antigen binding polypeptide complex described herein are joined by a cleavable linker.

### Detectable Labels and Drug Conjugates

[0233] In some aspects, an antigen binding polypeptide complex (e.g., an antibody or antigen binding fragment thereof) of the invention comprises one or more detectable labels. An antigen binding polypeptide complex (e.g., an antibody or antigen binding fragment thereof) containing a detectable label is useful in therapeutic, diagnostic, imaging (e.g., radioimaging), or basic research applications.

[0234] In some aspects, the detectable label is a radioactive label. Examples of a radioactive label include, but are not limited to, the isotopes ³H, ¹⁴C, ³²P, ³⁵S, ³⁶Cl, ⁵¹Cr, ⁵⁷Co, ⁵⁸Co, ⁵⁹Fe, ⁹⁰Y, ¹²¹I, ¹²⁴I, ¹²⁵I, ¹³¹I, ¹¹¹In, ¹¹⁷Lu ²¹¹At, ¹⁹⁸Au, ⁶⁷Cu, ²²⁵Ac, ²¹³Bi, ⁹⁹Tc, ¹⁸⁶Re and ⁸⁹Zr.

[0235] In some aspects, the detectable label is a chemiluminescent label, fluorescent label, enzyme, biotin, or a combination thereof.

[0236] In some aspects, the detectable label is a peptide tag. In some aspects, the peptide tag is located at the N-terminus of the polypeptide or polypeptide complex. In some aspects, the peptide tag is located at the C-terminus of the polypeptide or polypeptide complex. In some aspects, the peptide tag is an affinity tag or fusion tag.

[0237] In some aspects, the detectable label is a polyhistidine tag, polyarginine tag, glutathione-S-transferase (GST), maltose binding protein (MBP), chitin binding protein (CBP), Strep-tag, thioredoxin (TRX), poly(NANP), FLAG tag, ALFA-tag, V5-tag, Myc-tag, hemagglutinin (HA) tag, Spot tag, T7 tag, NE tag, or green fluorescence protein (GFP), or a combination thereof. In some aspects, the polyhistidine tag consists of from about 4 to about 10 histidine residues. In some aspects, the polyhistidine tag consists of about 4, about 5, about 6, about 7, about 8, about 9, or about 10 histidine residues.

[0238] Additional examples of detectable labels and methods for introducing detectable labels into a polypeptide are known and include routine chemical, molecular biology and recombinant DNA techniques. See, e.g., Hnatowich et al., Science, 220(4597):613-615, 1983; Yao et al., Int. J. Mol. Sci., 17(2):194, 2016; Kimple et al., Curr. Protoc. Protein Sci., 73:Unit 9.9, 2013; Sambrook J, Fritsch E F. Molecular Cloning: A Laboratory Manual. Cold Spring Harbor Laboratory Press; Cold Spring Harbor, N.Y.: 1989; Molecular Cell Biology, 4^{th} edition, Section 3.5, Purifying, Detecting and Characterizing Proteins; and Mahmoodi et al., Cogent Biology, 5(1):DOI: 10/1080/23312025.2019.1665406.

[0239] In some aspects, an antigen binding polypeptide complex (e.g., an antibody or antigen binding fragment thereof) of the invention is conjugated to an agent as an antibody-drug conjugate (ADC). An ADC of the invention is useful in therapeutic, diagnostic, imaging (e.g., radioimaging), or basic research applications.

[0240] In some aspects, an antigen binding polypeptide complex (e.g., an antibody or antigen binding fragment thereof) of the invention is conjugated to a cytotoxic agent, immunomodulating agent, imaging agent, or therapeutic protein, typically via a linker. The linker can comprise a cleavable unit or can be non-cleavable. Cleavable units include, for example, disulfide containing linkers that are cleavable through disulfide exchange, acid-labile linkers that are cleavable at acidic pH, and linkers that are cleavable by hydrolases, esterases, peptidases, and glucoronidases (e.g., peptide linkers and glucoronide linkers). Non-cleavable linkers are believed to release drug via a proteolytic antibody degradation mechanism.

[0241] Methods for making an ADC are known and include, but are not limited to, conjugation via thiols, amides, aldehydes, or azides, as well as other routine chemical, molecular biology and recombinant DNA techniques. See, e.g., Yao et al., Int. J. Mol. Sci., 17(2):194, 2016; Sambrook J, Fritsch E F. Molecular Cloning: A Laboratory Manual. Cold Spring Harbor Laboratory Press; Cold Spring Harbor, N.Y.: 1989; Molecular Cell Biology, 4^{th} edition, Section 3.5, Purifying, Detecting and Characterizing Proteins; and Mahmoodi et al., Cogent Biology, 5(1):DOI: 10/1080/23312025.2019.1665406.

### Modifications

[0242] In some aspects, the invention is directed to an antigen binding polypeptide complex (e.g., an antibody or antigen binding fragment thereof) comprising an effector function mutation or half-life extension mutation.

[0243] Effector functions are an important part of the humoral immune response and form an link between innate and adaptive immunity. Most effector functions are induced via the Fc region of an antibody, which can interact with complement proteins and specialized Fc receptors. As used herein, an “effector function mutation” refers to a change in the amino acid sequence, typically in the Fc region, which increases or decreases effector function, for example, increasing binding affinity of Fc for specific Fc receptors, or increasing antibody-dependent cellular cytotoxicity (ADCC) activity.

[0244] “Half-life” of a pharmaceutically active substance is the time it takes for the amount of the substance, once administered to the body, to reduce by half. A “half-life extension mutation” of an antigen binding polypeptide complex of the invention refers to a change in the amino acid sequence, typically in the Fc region, which increases the half-life of the antigen binding polypeptide complex (e.g., by increasing Fc receptor binding affinity, slowing off-rate for Fc and Fc receptors, and/or increased sialylation).

[0245] Examples of effector function mutations that increase function include, but are not limited to, the following substitutions in the Fc region, based on the EU numbering scheme: S298A/E333A/K334A, S239D/I332E, S239D/A330L/I332E, and G236A/S239D/I332E. Examples of effector function mutations that decrease function include, but are not limited to, the following substitutions in the Fc region, based on the EU numbering scheme: N297A and L234A/L235A. Additional examples of effector function mutations, half-life extension mutations and methods for incorporating the same into an amino acid sequence are known and described, for example, in Saunders, “Conceptual Approaches to Modulating Antibody Effector Functions and Circulation Half-Life,” Front. Immunol. Jun. 7, 2019.

[0246] In some aspects, the invention is directed to an antigen binding polypeptide complex (e.g., an antibody or antigen binding fragment thereof) comprising one or more knob-into-hole modifications.

[0247] The term “knob-into-hole modification” as used herein, refers to a genetic modification that directs the pairing of two polypeptides to promote heterodimerization. In some aspects, the modification introduces a protuberance (knob) into one polypeptide and a cavity (hole) into the other polypeptide at an interface in which the two polypeptides interact. In some aspects, a knob-into-hole modification can be created by introducing only a hole modification, for example, by replacing an amino acid residue with a smaller side chain than the original amino acid residue (e.g., a substitution of one or more serine, threonine, valine or alanine residues, or a combination thereof). In yet another aspect, a knob-into-hole modification can be created by introducing only a knob modification, for example, by replacing an amino acid residue with a larger side chain than the original amino acid residue (e.g., a substitution of one or more tryptophan or tyrosine residues, or a combination thereof).

[0248] In some aspects, the knob-into-hole modification is in the binding interface of two Fc regions, the binding interface of two CH2 regions, the binding interface of two CH3 regions, the binding interface of a CL region and a CH1 region, or the binding interface of a VH region and a VL region. See, e.g., U.S. Pub. No. 2007/0178552, Int'l Pub. No. WO 96/027011, Int'l Pub. No. WO 98/050431 and Zhu et al., Protein Science 6:781-788, 1987.

[0249] In some aspects, the antigen binding polypeptide complex comprises one, two, three, four, five, six, seven, eight, nine, ten, or more knob-into-hole modifications.

[0250] Knob-into-hole modifications are well known and can be incorporated into the antigen binding polypeptide complexes of the invention using routine molecular biology and recombinant DNA techniques. See, e.g., U.S. Pub. No. 2003/0078385; Int'l Pub. No. WO 96/027011; Ridgway et al., Protein Eng., 9:617-621, 1996; and Merchant et al., Nat. Biotechnol., 16:677-681, 1998.

[0251] In some aspects, the knob-into-hole modification is an amino acid substitution. As used herein, such a substitution is described based on the EU numbering scheme of Kabat, which corresponds to the numbering in the Protein Data Bank (PDB).

[0252] In some aspects, the knob-into-hole modification is a knob substitution of S354C and/or T366W, based on the EU numbering scheme.

[0253] In some aspects, the knob-into-hole modification is a hole substitution of Y349C, T366S, L368A, Y407V, L234A, L235A, P329A, M428L, N433S, M252Y, S254T, T256E, or any combination thereof, based on the EU numbering scheme.

[0254] In some aspects, the knob-into-hole modifications are hole substitutions of Y349C, T366S, L368A and Y407V, based on the EU numbering scheme. In some aspects, the knob-into-hole modifications are a hole substitutions of L234A, L235A and P329A, based on the EU numbering scheme. In some aspects, the knob-into-hole modifications are hole substitutions of L234A and L235A, based on the EU numbering scheme. In some aspects, the knob-into-hole modifications are hole substitutions of M428L and N433S, based on the EU numbering scheme. In some aspects, the knob-into-hole modifications are hole substitutions of M252Y, S254T and T256E, based on the EU numbering scheme.

[0255] In some aspects, an antigen binding polypeptide complex is an IgG1 or IgG4 antibody and the knob-into-hole modifications are knob substitutions of S354C and T366W and hole substitutions of Y349C, T366S, L368A and Y407V.

[0256] In some aspects, the antigen binding polypeptide complex is an IgG1 or IgG4 antibody and the knob-into-hole modifications are hole substitutions of L234A, L235A and P329A.

[0257] In some aspects, the antigen binding polypeptide complex is an IgG1 or IgG4 antibody and the knob-into-hole modifications are hole substitutions of L234A and L235A.

[0258] In some aspects, the antigen binding polypeptide complex is an IgG1 or IgG4 antibody and the knob-into-hole modifications are hole substitutions of M428L and N433S.

[0259] In some aspects, the antigen binding polypeptide complex is an IgG1 or IgG4 antibody and the knob-into-hole modifications are hole substitutions of M252Y, S254T and T256E.

### Polypeptides, Polynucleotides, Vectors, Cells, and Protein Production Methods

[0260] In some aspects, the invention is directed to a polypeptide encoding a portion of an antigen binding polypeptide complex (e.g., an antibody or antigen binding fragment thereof) described herein.

[0261] In some aspects, the invention is directed to a polypeptide comprising an amino acid sequence of one or more of SEQ ID NOs:136, 138, 140, 142, 144, 146, 148, 150, 152, 154, 156, 158, 160, 162, 164, 166, 168, 170, 172, 174, 176, 178, 180, 182, 184, 186, 188, 190, 192, 194, 196, 198, 200, 202, 204, 206, 208, 210, 212, 214, 216, 218, 220, 222, 224, 226, 228, 230, 232, 234, 236, 238, 240, 242, 244, 246, 248, 250, 252, 254, 256, 258, 260, 262, 264, 266, 268, 270, 272, 274, 276, 278, 280, 282, 284, 286, 288, 290, 292, 294, 296, 298, 300, 302, 304, 306, 308, 310, 312, 314, 316, 318, 320, 322, 234, 326, 328, 330, 332, 334, 336, 338, 340, 342, 344, 346, 348, 350, 352, 354, 356, 358, 360, 362, 364, 366, 368, 370, 372, 374, 376, 378, 380, 382, 399, 412, 424, 426, 436, 438, 449, 459, 469, 479, 481, 483, 493, 511, 513, 515, 517, 529, 531, 533, 545, 557, 559, 561, 563, 565, 568, 570, 572, 574, 577, 579, 581, 585, 587, 589, 591, 593, 595, 597, 599, 601, 603, 608, 610, 612, 614, 616, 618, 628, 630, 632, 634, 652, 670, 688, 706, 724, 742, 760, 778, 796, 814 and 832; or an amino acid sequence having at least 90% identity or at least 95% identity to one or more of SEQ ID NOs:136, 138, 140, 142, 144, 146, 148, 150, 152, 154, 156, 158, 160, 162, 164, 166, 168, 170, 172, 174, 176, 178, 180, 182, 184, 186, 188, 190, 192, 194, 196, 198, 200, 202, 204, 206, 208, 210, 212, 214, 216, 218, 220, 222, 224, 226, 228, 230, 232, 234, 236, 238, 240, 242, 244, 246, 248, 250, 252, 254, 256, 258, 260, 262, 264, 266, 268, 270, 272, 274, 276, 278, 280, 282, 284, 286, 288, 290, 292, 294, 296, 298, 300, 302, 304, 306, 308, 310, 312, 314, 316, 318, 320, 322, 234, 326, 328, 330, 332, 334, 336, 338, 340, 342, 344, 346, 348, 350, 352, 354, 356, 358, 360, 362, 364, 366, 368, 370, 372, 374, 376, 378, 380, 382, 399, 412, 424, 426, 436, 438, 449, 459, 469, 479, 481, 483, 493, 511, 513, 515, 517, 529, 531, 533, 545, 557, 559, 561, 563, 565, 568, 570, 572, 574, 577, 579, 581, 585, 587, 589, 591, 593, 595, 597, 599, 601, 603, 608, 610, 612, 614, 616, 618, 628, 630, 632, 634, 652, 670, 688, 706, 724, 742, 760, 778, 796, 814 and 832. For example, the polypeptide may comprise an amino acid sequence having at least 90% (such as at least 91%, 92%, 93%, 94%, 95%, 96%, 97%, 98%, or 99%) identity to one or more of SEQ ID NOs: 136, 138, 140, 142, 144, 146, 148, 150, 152, 154, 156, 158, 160, 162, 164, 166, 168, 170, 172, 174, 176, 178, 180, 182, 184, 186, 188, 190, 192, 194, 196, 198, 200, 202, 204, 206, 208, 210, 212, 214, 216, 218, 220, 222, 224, 226, 228, 230, 232, 234, 236, 238, 240, 242, 244, 246, 248, 250, 252, 254, 256, 258, 260, 262, 264, 266, 268, 270, 272, 274, 276, 278, 280, 282, 284, 286, 288, 290, 292, 294, 296, 298, 300, 302, 304, 306, 308, 310, 312, 314, 316, 318, 320, 322, 234, 326, 328, 330, 332, 334, 336, 338, 340, 342, 344, 346, 348, 350, 352, 354, 356, 358, 360, 362, 364, 366, 368, 370, 372, 374, 376, 378, 380, 382, 399, 412, 424, 426, 436, 438, 449, 459, 469, 479, 481, 483, 493, 511, 513, 515, 517, 529, 531, 533, 545, 557, 559, 561, 563, 565, 568, 570, 572, 574, 577, 579, 581, 585, 587, 589, 591, 593, 595, 597, 599, 601, 603, 608, 610, 612, 614, 616, 618, 628, 630, 632, 634, 652, 670, 688, 706, 724, 742, 760, 778, 796, 814 and 832. For example, the polypeptide may comprise the amino acid sequence of one or more of SEQ ID NOs: 136, 138, 140, 142, 144, 146, 148, 150, 152, 154, 156, 158, 160, 162, 164, 166, 168, 170, 172, 174, 176, 178, 180, 182, 184, 186, 188, 190, 192, 194, 196, 198, 200, 202, 204, 206, 208, 210, 212, 214, 216, 218, 220, 222, 224, 226, 228, 230, 232, 234, 236, 238, 240, 242, 244, 246, 248, 250, 252, 254, 256, 258, 260, 262, 264, 266, 268, 270, 272, 274, 276, 278, 280, 282, 284, 286, 288, 290, 292, 294, 296, 298, 300, 302, 304, 306, 308, 310, 312, 314, 316, 318, 320, 322, 234, 326, 328, 330, 332, 334, 336, 338, 340, 342, 344, 346, 348, 350, 352, 354, 356, 358, 360, 362, 364, 366, 368, 370, 372, 374, 376, 378, 380, 382, 399, 412, 424, 426, 436, 438, 449, 459, 469, 479, 481, 483, 493, 511, 513, 515, 517, 529, 531, 533, 545, 557, 559, 561, 563, 565, 568, 570, 572, 574, 577, 579, 581, 585, 587, 589, 591, 593, 595, 597, 599, 601, 603, 608, 610, 612, 614, 616, 618, 628, 630, 632, 634, 652, 670, 688, 706, 724, 742, 760, 778, 796, 814 and 832. 10262| In some aspects, the invention is directed to a polypeptide comprising an amino acid sequence encoded by the polynucleotide sequence of one or more of SEQ ID NOs:137, 139, 141, 143, 145, 147, 149, 151, 153, 155, 157, 159, 161, 163, 165, 167, 169, 171, 173, 175, 177, 179, 181, 183, 185, 187, 189, 191, 193, 195, 197, 199, 201, 203, 205, 207, 209, 211, 213, 215, 217, 219, 221, 223, 225, 227, 229, 231, 233, 235, 237, 239, 241, 243, 245, 247, 249, 251, 253, 255, 257, 259, 261, 263, 265, 267, 269, 271, 273, 275, 277, 279, 281, 283, 285, 287, 289, 291, 293, 295, 297, 299, 301, 303, 305, 307, 309, 311, 313, 315, 317, 319, 321, 323, 235, 327, 329, 331, 333, 335, 337, 339, 341, 343, 345, 347, 349, 351, 353, 355, 357, 359, 361, 363, 365, 367, 369, 371, 373, 375, 377, 379, 381, 383, 401, 413, 425, 427, 437, 439, 450, 460, 470, 480, 482, 484, 494, 512, 514, 516, 518, 530, 532, 534, 546, 558, 560, 562, 564, 566, 569, 571, 573, 575, 578, 580, 582, 586, 588, 590, 592, 594, 596, 598, 600, 602, 604, 609, 611, 613, 615, 617, 619, 629, 631, 633, 635, 653, 671, 689, 707, 725. 743, 761, 779, 797, 815 and 833; or encoded by a polynucleotide having at least 90% identity or at least 95% identity to one or more of SEQ ID NOs:137, 139, 141, 143, 145, 147, 149, 151, 153, 155, 157, 159, 161, 163, 165, 167, 169, 171, 173, 175, 177, 179, 181, 183, 185, 187, 189, 191, 193, 195, 197, 199, 201, 203, 205, 207, 209, 211, 213, 215, 217, 219, 221, 223, 225, 227, 229, 231, 233, 235, 237, 239, 241, 243, 245, 247, 249, 251, 253, 255, 257, 259, 261, 263, 265, 267, 269, 271, 273, 275, 277, 279, 281, 283, 285, 287, 289, 291, 293, 295, 297, 299, 301, 303, 305, 307, 309, 311, 313, 315, 317, 319, 321, 323, 235, 327, 329, 331, 333, 335, 337, 339, 341, 343, 345, 347, 349, 351, 353, 355, 357, 359, 361, 363, 365, 367, 369, 371, 373, 375, 377, 379, 381, 383, 401, 413, 425, 427, 437, 439, 450, 460, 470, 480, 482, 484, 494, 512, 514, 516, 518, 530, 532, 534, 546, 558, 560, 562, 564, 566, 569, 571, 573, 575, 578, 580, 582, 586, 588, 590, 592, 594, 596, 598, 600, 602, 604, 609, 611, 613, 615, 617, 619, 629, 631, 633, 635, 653, 671, 689, 707, 725. 743, 761, 779, 797, 815 and 833. For example, the polypeptide may comprise an amino acid sequence encoded by a polynucleotide having at least 90% (such as at least 91%, 92%, 93%, 94%, 95%, 96%, 97%, 98%, or 99%) identity to one or more of SEQ ID NOs: 137, 139, 141, 143, 145, 147, 149, 151, 153, 155, 157, 159, 161, 163, 165, 167, 169, 171, 173, 175, 177, 179, 181, 183, 185, 187, 189, 191, 193, 195, 197, 199, 201, 203, 205, 207, 209, 211, 213, 215, 217, 219, 221, 223, 225, 227, 229, 231, 233, 235, 237, 239, 241, 243, 245, 247, 249, 251, 253, 255, 257, 259, 261, 263, 265, 267, 269, 271, 273, 275, 277, 279, 281, 283, 285, 287, 289, 291, 293, 295, 297, 299, 301, 303, 305, 307, 309, 311, 313, 315, 317, 319, 321, 323, 235, 327, 329, 331, 333, 335, 337, 339, 341, 343, 345, 347, 349, 351, 353, 355, 357, 359, 361, 363, 365, 367, 369, 371, 373, 375, 377, 379, 381, 383, 401, 413, 425, 427, 437, 439, 450, 460, 470, 480, 482, 484, 494, 512, 514, 516, 518, 530, 532, 534, 546, 558, 560, 562, 564, 566, 569, 571, 573, 575, 578, 580, 582, 586, 588, 590, 592, 594, 596, 598, 600, 602, 604, 609, 611, 613, 615, 617, 619, 629, 631, 633, 635, 653, 671, 689, 707, 725. 743, 761, 779, 797, 815 and 833. For example, the polypeptide may comprise an amino acid sequence encoded by a polynucleotide sequence of one or more of SEQ ID NOs: 137, 139, 141, 143, 145, 147, 149, 151, 153, 155, 157, 159, 161, 163, 165, 167, 169, 171, 173, 175, 177, 179, 181, 183, 185, 187, 189, 191, 193, 195, 197, 199, 201,203, 205, 207, 209, 211, 213, 215, 217, 219, 221, 223, 225, 227, 229, 231, 233, 235, 237, 239, 241, 243, 245, 247, 249, 251, 253, 255, 257, 259, 261, 263, 265, 267, 269, 271, 273, 275, 277, 279, 281, 283, 285, 287, 289, 291, 293, 295, 297, 299, 301, 303, 305, 307, 309, 311, 313, 315, 317, 319, 321, 323, 235, 327, 329, 331, 333, 335, 337, 339, 341, 343, 345, 347, 349, 351, 353, 355, 357, 359, 361, 363, 365, 367, 369, 371, 373, 375, 377, 379, 381, 383, 401, 413, 425, 427, 437, 439, 450, 460, 470, 480, 482, 484, 494, 512, 514, 516, 518, 530, 532, 534, 546, 558, 560, 562, 564, 566, 569, 571, 573, 575, 578, 580, 582, 586, 588, 590, 592, 594, 596, 598, 600, 602, 604, 609, 611, 613, 615, 617, 619, 629, 631, 633, 635, 653, 671, 689, 707, 725. 743, 761, 779, 797, 815 and 833.

[0262] In some aspects, the invention is directed to a polynucleotide encoding a portion of an antigen binding polypeptide complex (e.g., an antibody or antigen binding fragment thereof) described herein. As used herein, a “polynucleotide” includes DNA and RNA (e.g., mRNA).

[0263] In some aspects, the invention is directed to a polynucleotide comprising a polynucleotide sequence of one or more of SEQ ID NOs:137, 139, 141, 143, 145, 147, 149, 151, 153, 155, 157, 159, 161, 163, 165, 167, 169, 171, 173, 175, 177, 179, 181, 183, 185, 187, 189, 191, 193, 195, 197, 199, 201, 203, 205, 207, 209, 211, 213, 215, 217, 219, 221, 223, 225, 227, 229, 231, 233, 235, 237, 239, 241, 243, 245, 247, 249, 251, 253, 255, 257, 259, 261, 263, 265, 267, 269, 271, 273, 275, 277, 279, 281, 283, 285, 287, 289, 291, 293, 295, 297, 299, 301, 303, 305, 307, 309, 311, 313, 315, 317, 319, 321, 323, 235, 327, 329, 331, 333, 335, 337, 339, 341, 343, 345, 347, 349, 351, 353, 355, 357, 359, 361, 363, 365, 367, 369, 371, 373, 375, 377, 379, 381, 383, 401, 413, 425, 427, 437, 439, 450, 460, 470, 480, 482, 484, 494, 512, 514, 516, 518, 530, 532, 534, 546, 558, 560, 562, 564, 566, 569, 571, 573, 575, 578, 580, 582, 586, 588, 590, 592, 594, 596, 598, 600, 602, 604, 609, 611, 613, 615, 617, 619, 629, 631, 633, 635, 653, 671, 689, 707, 725. 743, 761, 779, 797, 815 and 833; or a polynucleotide having at least 90% identity or at least 95% identity to one or more of SEQ ID NOs:137, 139, 141, 143, 145, 147, 149, 151, 153, 155, 157, 159, 161, 163, 165, 167, 169, 171, 173, 175, 177, 179, 181, 183, 185, 187, 189, 191, 193, 195, 197, 199, 201, 203, 205, 207, 209, 211, 213, 215, 217, 219, 221, 223, 225, 227, 229, 231, 233, 235, 237, 239, 241, 243, 245, 247, 249, 251, 253, 255, 257, 259, 261, 263, 265, 267, 269, 271, 273, 275, 277, 279, 281, 283, 285, 287, 289, 291, 293, 295, 297, 299, 301, 303, 305, 307, 309, 311, 313, 315, 317, 319, 321, 323, 235, 327, 329, 331, 333, 335, 337, 339, 341, 343, 345, 347, 349, 351, 353, 355, 357, 359, 361, 363, 365, 367, 369, 371, 373, 375, 377, 379, 381, 383, 401, 413, 425, 427, 437, 439, 450, 460, 470, 480, 482, 484, 494, 512, 514, 516, 518, 530, 532, 534, 546, 558, 560, 562, 564, 566, 569, 571, 573, 575, 578, 580, 582, 586, 588, 590, 592, 594, 596, 598, 600, 602, 604, 609, 611, 613, 615, 617, 619, 629, 631, 633, 635, 653, 671, 689, 707, 725. 743, 761, 779, 797, 815 and 833. For example, the polynucleotide may comprise a polynucleotide sequence having at least 90% (such as at least 91%, 92%, 93%, 94%, 95%, 96%, 97%, 98%, or 99%) identity to one or more of SEQ ID NOs: 137, 139, 141, 143, 145, 147, 149, 151, 153, 155, 157, 159, 161, 163, 165, 167, 169, 171, 173, 175, 177, 179, 181, 183, 185, 187, 189, 191, 193, 195, 197, 199, 201, 203, 205, 207, 209, 211, 213, 215, 217, 219, 221, 223, 225, 227, 229, 231, 233, 235, 237, 239, 241, 243, 245, 247, 249, 251, 253, 255, 257, 259, 261, 263, 265, 267, 269, 271, 273, 275, 277, 279, 281, 283, 285, 287, 289, 291, 293, 295, 297, 299, 301, 303, 305, 307, 309, 311, 313, 315, 317, 319, 321, 323, 235, 327, 329, 331, 333, 335, 337, 339, 341, 343, 345, 347, 349, 351, 353, 355, 357, 359, 361, 363, 365, 367, 369, 371, 373, 375, 377, 379, 381, 383, 401, 413, 425, 427, 437, 439, 450, 460, 470, 480, 482, 484, 494, 512, 514, 516, 518, 530, 532, 534, 546, 558, 560, 562, 564, 566, 569, 571, 573, 575, 578, 580, 582, 586, 588, 590, 592, 594, 596, 598, 600, 602, 604, 609, 611, 613, 615, 617, 619, 629, 631, 633, 635, 653, 671, 689, 707, 725. 743, 761, 779, 797, 815 and 833. For example, the polynucleotide may comprise the polynucleotide sequence of one or more of SEQ ID NOs: 137, 139, 141, 143, 145, 147, 149, 151, 153, 155, 157, 159, 161, 163, 165, 167, 169, 171, 173, 175, 177, 179, 181, 183, 185, 187, 189, 191, 193, 195, 197, 199, 201, 203, 205, 207, 209, 211, 213, 215, 217, 219, 221, 223, 225, 227, 229, 231, 233, 235, 237, 239, 241, 243, 245, 247, 249, 251, 253, 255, 257, 259, 261, 263, 265, 267, 269, 271, 273, 275, 277, 279, 281, 283, 285, 287, 289, 291, 293, 295, 297, 299, 301, 303, 305, 307, 309, 311, 313, 315, 317, 319, 321, 323, 235, 327, 329, 331, 333, 335, 337, 339, 341, 343, 345, 347, 349, 351, 353, 355, 357, 359, 361, 363, 365, 367, 369, 371, 373, 375, 377, 379, 381, 383, 401, 413, 425, 427, 437, 439, 450, 460, 470, 480, 482, 484, 494, 512, 514, 516, 518, 530, 532, 534, 546, 558, 560, 562, 564, 566, 569, 571, 573, 575, 578, 580, 582, 586, 588, 590, 592, 594, 596, 598, 600, 602, 604, 609, 611, 613, 615, 617, 619, 629, 631, 633, 635, 653, 671, 689, 707, 725. 743, 761, 779, 797, 815 and 833.

[0264] In some aspects, the invention is directed to a polynucleotide encoding a polypeptide of one or more of SEQ ID NOs:136, 138, 140, 142, 144, 146, 148, 150, 152, 154, 156, 158, 160, 162, 164, 166, 168, 170, 172, 174, 176, 178, 180, 182, 184, 186, 188, 190, 192, 194, 196, 198, 200, 202, 204, 206, 208, 210, 212, 214, 216, 218, 220, 222, 224, 226, 228, 230, 232, 234, 236, 238, 240, 242, 244, 246, 248, 250, 252, 254, 256, 258, 260, 262, 264, 266, 268, 270, 272, 274, 276, 278, 280, 282, 284, 286, 288, 290, 292, 294, 296, 298, 300, 302, 304, 306, 308, 310, 312, 314, 316, 318, 320, 322, 234, 326, 328, 330, 332, 334, 336, 338, 340, 342, 344, 346, 348, 350, 352, 354, 356, 358, 360, 362, 364, 366, 368, 370, 372, 374, 376, 378, 380, 382, 399, 412, 424, 426, 436, 438, 449, 459, 469, 479, 481, 483, 493, 511, 513, 515, 517, 529, 531, 533, 545, 557, 559, 561, 563, 565, 568, 570, 572, 574, 577, 579, 581, 585, 587, 589, 591, 593, 595, 597, 599, 601, 603, 608, 610, 612, 614, 616, 618, 628, 630, 632, 634, 652, 670, 688, 706, 724, 742, 760, 778, 796, 814 and 832; or a polypeptide having at least 90% identity or at least 95% identity to one or more of SEQ ID NOs:136, 138, 140, 142, 144, 146, 148, 150, 152, 154, 156, 158, 160, 162, 164, 166, 168, 170, 172, 174, 176, 178, 180, 182, 184, 186, 188, 190, 192, 194, 196, 198, 200, 202, 204, 206, 208, 210, 212, 214, 216, 218, 220, 222, 224, 226, 228, 230, 232, 234, 236, 238, 240, 242, 244, 246, 248, 250, 252, 254, 256, 258, 260, 262, 264, 266, 268, 270, 272, 274, 276, 278, 280, 282, 284, 286, 288, 290, 292, 294, 296, 298, 300, 302, 304, 306, 308, 310, 312, 314, 316, 318, 320, 322, 234, 326, 328, 330, 332, 334, 336, 338, 340, 342, 344, 346, 348, 350, 352, 354, 356, 358, 360, 362, 364, 366, 368, 370, 372, 374, 376, 378, 380, 382, 399, 412, 424, 426, 436, 438, 449, 459, 469, 479, 481, 483, 493, 511, 513, 515, 517, 529, 531, 533, 545, 557, 559, 561, 563, 565, 568, 570, 572, 574, 577, 579, 581, 585, 587, 589, 591, 593, 595, 597, 599, 601, 603, 608, 610, 612, 614, 616, 618, 628, 630, 632, 634, 652, 670, 688, 706, 724, 742, 760, 778, 796, 814 and 832. For example, the polynucleotide may encode a polypeptide comprising an amino acid sequence having at least 90% (such as at least 91%, 92%, 93%, 94%, 95%, 96%, 97%, 98%, or 99%) identity to one or more of SEQ ID NOs: 136, 138, 140, 142, 144, 146, 148, 150, 152, 154, 156, 158, 160, 162, 164, 166, 168, 170, 172, 174, 176, 178, 180, 182, 184, 186, 188, 190, 192, 194, 196, 198, 200, 202, 204, 206, 208, 210, 212, 214, 216, 218, 220, 222, 224, 226, 228, 230, 232, 234, 236, 238, 240, 242, 244, 246, 248, 250, 252, 254, 256, 258, 260, 262, 264, 266, 268, 270, 272, 274, 276, 278, 280, 282, 284, 286, 288, 290, 292, 294, 296, 298, 300, 302, 304, 306, 308, 310, 312, 314, 316, 318, 320, 322, 234, 326, 328, 330, 332, 334, 336, 338, 340, 342, 344, 346, 348, 350, 352, 354, 356, 358, 360, 362, 364, 366, 368, 370, 372, 374, 376, 378, 380, 382, 399, 412, 424, 426, 436, 438, 449, 459, 469, 479, 481, 483, 493, 511, 513, 515, 517, 529, 531, 533, 545, 557, 559, 561, 563, 565, 568, 570, 572, 574, 577, 579, 581, 585, 587, 589, 591, 593, 595, 597, 599, 601, 603, 608, 610, 612, 614, 616, 618, 628, 630, 632, 634, 652, 670, 688, 706, 724, 742, 760, 778, 796, 814 and 832. For example, the polynucleotide may encode a polypeptide comprising the amino acid sequence of one or more of SEQ ID NOs: 136, 138, 140, 142, 144, 146, 148, 150, 152, 154, 156, 158, 160, 162, 164, 166, 168, 170, 172, 174, 176, 178, 180, 182, 184, 186, 188, 190, 192, 194, 196, 198, 200, 202, 204, 206, 208, 210, 212, 214, 216, 218, 220, 222, 224, 226, 228, 230, 232, 234, 236, 238, 240, 242, 244, 246, 248, 250, 252, 254, 256, 258, 260, 262, 264, 266, 268, 270, 272, 274, 276, 278, 280, 282, 284, 286, 288, 290, 292, 294, 296, 298, 300, 302, 304, 306, 308, 310, 312, 314, 316, 318, 320, 322, 234, 326, 328, 330, 332, 334, 336, 338, 340, 342, 344, 346, 348, 350, 352, 354, 356, 358, 360, 362, 364, 366, 368, 370, 372, 374, 376, 378, 380, 382, 399, 412, 424, 426, 436, 438, 449, 459, 469, 479, 481, 483, 493, 511, 513, 515, 517, 529, 531, 533, 545, 557, 559, 561, 563, 565, 568, 570, 572, 574, 577, 579, 581, 585, 587, 589, 591, 593, 595, 597, 599, 601, 603, 608, 610, 612, 614, 616, 618, 628, 630, 632, 634, 652, 670, 688, 706, 724, 742, 760, 778, 796, 814 and 832.

[0265] In other aspects, the invention is directed to a vector comprising one or more polynucleotides described herein.

[0266] In yet other aspects, the invention is directed to a host cell comprising one or more polynucleotides and/or vectors described herein. For example, the host cell may comprise one or more polynucleotide described herein. For example, the host cell may comprise one or more vectors described herein.

[0267] As used herein, the term “host cell” can be any type of cell, e.g., a primary cell, a cell in culture, or a cell from a cell line. In some aspects, the term “host cell” refers to a cell containing a foreign gene [e.g., a cell subjected to gene delivery or transfected with a polynucleotide (e.g., DNA or mRNA) encoding the gene] and the progeny or potential progeny of such a cell. Progeny of such a cell may not be identical to the parent cell transfected with the nucleic acid molecule, e.g., due to mutations or environmental influences that may occur in succeeding generations or integration of the nucleic acid molecule into the host cell genome.

[0268] Methods which are well known to those skilled in the art can be used to construct vectors encoding antigen binding polypeptide complexes (e.g., CDR, VH, VL, heavy chain and/or light chain coding sequences and appropriate transcriptional and translational control signals). These methods include, for example, in vitro recombinant DNA techniques, synthetic techniques, and in vivo genetic recombination.

[0269] A vector can be transferred to a host cell by conventional techniques and the resulting cells can then be cultured by conventional techniques to produce an antigen binding polypeptide complex comprising, e.g., six CDRs, VH, VL, VH and VL, heavy chain, light chain, or heavy and light chain, or a domain thereof (e.g., one or more CDRs, VH, VL, VH and VL, heavy chain, or light chain). Thus, provided herein are host cells containing a polynucleotide encoding an antigen binding polypeptide complex comprising, e.g., comprising six CDRs, VH, VL, VH and VL, heavy chain, light chain, or heavy and light chain, or a domain thereof (e.g., one or more CDRs, VH, VL, VH and VL, heavy chain, or light chain), operably linked to a promoter for expression of such sequences in the host cell. In some aspects, vectors encoding both heavy and light chains, or a domain thereof, individually, can be co-expressed in the host cell for expression. In some aspects, a host cell contains a vector comprising a polynucleotide encoding both a heavy chain and light chain, or a domain thereof. In some aspects, a host cell contains two different vectors, a first vector comprising a polynucleotide encoding a heavy chain or a domain thereof, and a second vector comprising a polynucleotide encoding a light chain or a domain thereof. In some aspects, a first host cell comprises a first vector comprising a polynucleotide encoding a heavy chain or a domain thereof, and a second host cell comprises a second vector comprising a polynucleotide encoding a light chain or a domain thereof. In some aspects, provided herein is a population of host cells comprising such a first host cell and such a second host cell.

[0270] In some aspects, provided herein is a population of vectors comprising a first vector comprising a polynucleotide encoding a light chain or domain thereof, and a second vector comprising a polynucleotide encoding a heavy chain or domain thereof. Alternatively, a single vector can be used which encodes, and is capable of expressing, both heavy and light chain polypeptides or a domain thereof.

[0271] A variety of host-vector systems can be utilized to express the polypeptides and polypeptide complexes described herein. Such host-vector systems represent vehicles by which the coding sequences of interest can be produced and subsequently purified, but also represent cells which can, when transformed or transfected with the appropriate nucleotide coding sequences, express a polypeptide or polypeptide complex described herein in situ. These include but are not limited to microorganisms such as bacteria (e.g., E. coli and B. subtilis) transformed with recombinant bacteriophage DNA, plasmid DNA or cosmid DNA expression vectors containing antibody coding sequences; yeast (e.g., Saccharomyces pichia) transformed with recombinant yeast expression vectors containing antibody coding sequences; insect cell systems infected with recombinant virus expression vectors (e.g., baculovirus) containing antibody coding sequences; plant cell systems (e.g., green algae such as Chlamydomonas reinhardtii) infected with recombinant virus expression vectors (e.g., cauliflower mosaic virus, CaMV; tobacco mosaic virus, TMV) or transformed with recombinant plasmid expression vectors (e.g., Ti plasmid) containing antibody coding sequences; or mammalian cell systems (e.g., COS (e.g., COS1 or COS), CHO, BHK, MDCK, HEK 293, NS0, PER.C6, VERO, CRL7O3O, HsS78Bst, HeLa, and NIH 3T3, HEK-293T, HepG2, SP210, R1.1, B-W, L-M, BSC1, BSC40, YB/20, and BMT10 cells) harboring recombinant expression constructs containing promoters derived from the genome of mammalian cells (e.g., metallothionein promoter) or from mammalian viruses (e.g., the adenovirus late promoter; the vaccinia virus 7.5K promoter). In some aspects, cells for expressing polypeptide or polypeptide complexes described herein are CHO cells, for example CHO cells from the CHO GS System™ (Lonza). In some aspects, cells for expressing polypeptides or polypeptide complexes of the invention are human cells, e.g., human cell lines. In some aspects, a mammalian expression vector is pOptiVEC™ or pcDNA3.3. In some aspects, bacterial cells such as Escherichia coli, or eukaryotic cells (e.g., mammalian cells) are used for the expression of recombinant polypeptides. For example, mammalian cells such as Chinese hamster ovary (CHO) cells in conjunction with a vector such as the major intermediate early gene promoter element from human cytomegalovirus is an effective expression system for polypeptides (Foecking M K & Hofstetter H (1986) Gene 45: 101-105; and Cockett M I et al., (1990) Biotechnology 8: 662-667). In some aspects, polypeptides or polypeptide complexes described herein are produced by HEK-293T cells.

[0272] In addition, a host cell strain can be chosen which modulates the expression of the inserted sequences, or modifies and processes the gene product in the specific fashion desired. Such modifications (e.g., glycosylation) and processing (e.g., cleavage) of protein products can contribute to the function of the protein. To this end, eukaryotic host cells which possess the cellular machinery for proper processing of the primary transcript, glycosylation, and phosphorylation of the gene product can be used. Such mammalian host cells include but are not limited to CHO, VERO, BHK, Hela, MDCK, HEK 293, NIH 3T3, W138, BT483, Hs578T, HTB2, BT20 and T47D, NS0 (a murine myeloma cell line that does not endogenously produce any immunoglobulin chains), CRL7O3O, COS (e.g., COS1 or COS), PER.C6, VERO, HsS78Bst, HEK-293T, HepG2, SP210, R1.1, B-W, L-M, BSC1, BSC40, YB/20, BMT10 and HsS78Bst cells.

[0273] Once a polypeptide or polypeptide complex described herein has been produced by recombinant expression, it can be purified by any method known in the art for purification of a protein or immunoglobulin molecule, for example, by chromatography (e.g., ion exchange, affinity, particularly by affinity for the specific antigen after Protein A, and size exclusion chromatography), centrifugation, differential solubility, or by any other standard technique for the purification of proteins. Further, the polypeptides or polypeptide complexes described herein can be fused to heterologous polypeptide sequences described herein (e.g., tags) or otherwise known in the art to facilitate purification.

[0274] In some aspects, a polypeptide or polypeptide complex described herein is isolated or purified. Generally, an isolated polypeptide or polypeptide complex is one that is substantially free of other polypeptides or polypeptide complexes with different antigenic specificities. For example, in some aspects, a preparation of a polypeptide or polypeptide complex described herein is substantially free of cellular material and/or chemical precursors.

### Pharmaceutical Compositions and Kits

[0275] In some aspects, the invention is directed to a pharmaceutical composition comprising an antigen binding polypeptide complex (e.g., antibody or antigen binding fragment thereof), polypeptide(s), polynucleotide(s), vector(s), or cell(s) described herein.

[0276] In some aspects, the invention is directed to a pharmaceutical composition comprising (1) an antigen binding polypeptide complex (e.g., antibody or antigen binding fragment thereof), polynucleotide, vector, or cell described herein, and (2) a pharmaceutically acceptable carrier. The term “pharmaceutically acceptable carrier” includes any and all solvents, co-solvents, complexing agents, dispersion media, coatings, antibacterial and antifungal agents, isotonic and absorption delaying agents, and the like, which are not biologically or otherwise undesirable. The use of such media and agents for pharmaceutically active substances is known in the art. Except insofar as any conventional media or agent is incompatible with the active ingredient, its use in the therapeutic formulations is contemplated. Supplementary active ingredients can also be incorporated into the pharmaceutical compositions of the invention. In addition, various excipients, such as are commonly used in the art, can be included. These and other such compounds are described in the literature, e.g., in the Merck Index, Merck & Company, Rahway, NJ. Considerations for the inclusion of various components in pharmaceutical compositions are described, e.g., in Gilman et al. (Eds.) (2010); Goodman and Gilman's: The Pharmacological Basis of Therapeutics, 12th Ed., The McGraw-Hill Companies. In some aspects, the pharmaceutical composition is for parenteral, intravenous or subcutaneous administration.

[0277] In other aspects, the invention is directed to a kit comprising an antigen binding polypeptide complex (e.g., antibody or antigen binding fragment thereof), polypeptide(s), polynucleotide(s), vector(s), cell(s), or pharmaceutical composition described herein, or a combination thereof. Once a pharmaceutical composition has been formulated, it can be stored in sterile vials as a solution, suspension, gel, emulsion, solid, crystal, or as a dehydrated or lyophilized powder. Such formulations may be stored either in a ready-to-use form or in a form (e.g., lyophilized) that is reconstituted prior to administration. In some aspects, the invention provides kits for producing a single-dose administration unit. In some aspects, the kits of the invention can contain both a first container having a dried protein and a second container having an aqueous formulation. In some aspects, kits containing single and multi-chambered pre-filled syringes (e.g., liquid syringes and lyosyringes) are also provided. In some aspects, the kit contains components for intravenous or subcutaneous administration.

### Methods of Use

[0278] In some aspects, the invention is directed to certain methods of use of an antigen binding polypeptide complex (e.g., an antibody or antigen binding fragment thereof), polypeptide(s), polynucleotide(s), vector(s), cell(s), or pharmaceutical composition described herein, or a combination thereof. Any of the antigen binding polypeptide complex structures described herein targeting one or more of the targets described herein may be used in any of the methods and uses of the invention.

[0279] In some aspects, the invention is directed to a method of treating or preventing a disease or condition, comprising administering to a subject in need thereof an antigen binding polypeptide complex (e.g., antibody or antigen binding fragment thereof), polypeptide(s), polynucleotide(s), vector(s), cell(s), or pharmaceutical composition described herein, or a combination thereof. In some aspects, the invention is directed to a method of treating or preventing a disease or condition, comprising administering to a subject in need thereof a therapeutically effective amount of an antigen binding polypeptide complex (e.g., antibody or antigen binding fragment thereof), polypeptide(s), polynucleotide(s), vector(s), cell(s), or pharmaceutical composition described herein, or a combination thereof. The present invention further provides an antigen binding polypeptide complex (e.g., antibody or antigen binding fragment thereof), polypeptide(s), polynucleotide(s), vector(s), cell(s), or pharmaceutical composition described herein, or a combination thereof, for use in treating or preventing a disease or condition in a subject. The present invention further provides the use of an antigen binding polypeptide complex (e.g., antibody or antigen binding fragment thereof), polypeptide(s), polynucleotide(s), vector(s), cell(s), or pharmaceutical composition described herein, or a combination thereof in the manufacture of a medicament for the treatment or prevention of a disease or condition in a subject.

[0280] In some aspects, the invention is directed to a method of treating cancer comprising administering to a subject in need thereof an antigen binding polypeptide complex (e.g., antibody or antigen binding fragment thereof), polypeptide(s), polynucleotide(s), vector(s), cell(s) or pharmaceutical composition described herein, or a combination thereof. In some aspects, the cancer is a solid cancer. In some aspects, the cancer is breast cancer, lung cancer, gastric cancer, prostate cancer, cervical cancer, urothelial cancer, or pancreatic cancer. In some aspects, the cancer is a hematological cancer. In some aspects, the hematological cancer is leukemia or lymphoma. In some aspects, the leukemia or lymphoma is B cell leukemia, B cell lymphoma, diffuse large B-cell lymphoma (DLBCL) Follicular lymphoma, Chronic lymphocytic leukemia (CLL)/small lymphocytic lymphoma (SLL), Mantle cell lymphoma (MCL), Burkitt lymphoma, Lymphoplasmacytic lymphoma (Waldenstrom macroglobulinemia), prolymphocytic leukemia (PLL), or hairy cell leukemia (HCL).

[0281] The present invention further provides an antigen binding polypeptide complex (e.g., antibody or antigen binding fragment thereof), polypeptide(s), polynucleotide(s), vector(s), cell(s), or pharmaceutical composition described herein, or a combination thereof, for use in treating or preventing a cancer in a subject. The present invention further provides the use of an antigen binding polypeptide complex (e.g., antibody or antigen binding fragment thereof), polypeptide(s), polynucleotide(s), vector(s), cell(s), or pharmaceutical composition described herein, or a combination thereof in the manufacture of a medicament for the treatment or prevention of a cancer in a subject.

[0282] In some aspects, the invention is directed to a method of treating or preventing a viral infection comprising administering to a subject in need thereof an antigen binding polypeptide complex (e.g., antibody or antigen binding fragment thereof), polypeptide(s), polynucleotide(s), vector(s), cell(s) or pharmaceutical composition described herein, or a combination thereof. In some aspects, the invention is directed to an antigen binding polypeptide complex (e.g., antibody or antigen binding fragment thereof), polypeptide(s), polynucleotide(s), vector(s), cell(s), or pharmaceutical composition described herein, or a combination thereof, for use in treating or preventing a viral infection in a subject. The present invention further provides the use of an antigen binding polypeptide complex (e.g., antibody or antigen binding fragment thereof), polypeptide(s), polynucleotide(s), vector(s), cell(s), or pharmaceutical composition described herein, or a combination thereof in the manufacture of a medicament for the treatment or prevention of a viral infection in a subject. 10284| As used herein, the term “subject” means a human or a non-human mammal, e.g., a dog, a cat, a mouse, a rat, a cow, a sheep, a pig, a goat, a non-human primate or a bird, e.g., a chicken, as well as any other vertebrate or invertebrate. In some aspects, the subject is a human. In some aspects, the subject is a veterinary animal. In some aspects, the subject is a mammal.

[0283] As used herein, the terms “treat” or “treatment” refer to therapeutic or palliative measures. Beneficial or desired clinical results include, but are not limited to, alleviation, in whole or in part, of symptoms associated with a disease or disorder or condition, diminishment of the extent of disease, stabilized (i.e., not worsening) state of disease, delay or slowing of disease progression, amelioration or palliation of the disease state (e.g., one or more symptoms of the disease), and remission (whether partial or total), whether detectable or undetectable. “Treatment” can also mean prolonging survival as compared to expected survival if not receiving treatment.

[0284] As used herein, a “therapeutically effective amount” is an amount of an antigen binding polypeptide complex (e.g., an antibody or antigen binding fragment thereof) that is sufficient to achieve the desired effect and can vary according to the nature and severity of the disease condition, and the potency of the polypeptide or polypeptide complex. In some aspects, an antigen binding polypeptide complex of the invention can be delivered by administering a polynucleotide, vector, cell that encodes the antigen binding polypeptide complex. In some aspects, an antigen binding polypeptide complex thereof can be delivered by administering a pharmaceutical composition containing the polypeptide or polypeptide complex. A therapeutic effect is the relief, to some extent, of one or more of the symptoms of the disease, and can include curing a disease. “Curing” means that the symptoms of active disease are eliminated. However, certain long-term or permanent effects of the disease can exist even after a cure is obtained.

[0285] Clauses relating to aspects of the invention:
[0286] 1. An antigen binding polypeptide complex comprising a first polypeptide, a second polypeptide, and a third polypeptide;
[0287] (a) wherein the first polypeptide has a structure represented by:
   [0288] VL1-L1-VH1-L2-Fc;
   [0289] VH1-L3-VL1-L4-Fc;
   [0290] VH1-L1-VL1-L2-Fc; or
   [0291] VL1-L3-VH1-L4-Fc;
[0292] wherein the second polypeptide has a structure represented by:
   [0293] VH2-L5-VH3-L6-CH1-L7-Fc; or
   [0294] VH3-L5-VH2-L6-CH1-L7-Fc;
[0295] wherein the third polypeptide has a structure represented by:
   [0296] VL2-L8-VL3-L9-CL; or
   [0297] VL3-L8-VL2-L9-CL;
[0298] or
[0299] wherein the first polypeptide has a structure represented by:
   [0300] VL1-L1-VL2-L2-VH2-L3-VH1-L4-Fc;
   [0301] VL1-L1-VH2-L2-VL2-L3-VH1-L4-Fc;
   [0302] VH1-L5-VH2-L6-VL2-L7-VL1-L8-Fc; or
   [0303] VH1-L5-VL2-L6-VH2-L7-VL1-L8-Fc;
[0304] wherein the second polypeptide has a structure represented by:
   [0305] VH3-L9-VH4-L10-CH1-L11-Fc or
   [0306] VH4-L9-VH3-L10-CH1-L11-Fc;
[0307] wherein the third polypeptide has a structure represented by:
   [0308] VL3-L12-VL4-L13-CL; or
   [0309] VL4-L12-VL3-L13-CL;
[0310] wherein
[0311] VL1 is a first immunoglobulin light chain variable region; VL2 is a second immunoglobulin light chain variable region; VL3 is a third immunoglobulin light chain variable region; VL4 is a fourth immunoglobulin light chain variable region; VH1 is a first immunoglobulin heavy chain variable region; VH2 is a second immunoglobulin heavy chain variable region; VH3 is a third immunoglobulin heavy chain variable region; VH4 is a fourth immunoglobulin heavy chain variable region; Fc is a region comprising an immunoglobulin heavy chain constant region 2 (CH2), an immunoglobulin heavy chain constant region 3 (CH3), and optionally, an immunoglobulin hinge; CH1 is an immunoglobulin heavy chain constant region 1; CL is an immunoglobulin light chain constant region; and L1-L13 are amino acid linkers; or
[0312] (b) wherein the first polypeptide has a structure represented by:
   [0313] VL1-L1-VH1-L2-Fc;
   [0314] VH1-L3-VL1-L4-Fc;
   [0315] VH1-L1-VL1-L2-Fc; or
   [0316] VL1-L3-VH1-L4-Fc;
[0317] wherein the second polypeptide has a structure represented by:
   [0318] VH2-L5-VH3-L6-CH1-L7-Fc; or
   [0319] VH3-L5-VH2-L6-CH1-L7-Fc;
[0320] wherein the third polypeptide has a structure represented by:
   [0321] VL2-L8-VL3-L9-CL; or
   [0322] VL3-L8-VL2-L9-CL;
[0323] or
[0324] wherein the first polypeptide has a structure represented by:
   [0325] VL1-L1-VL2-L2-VH2-L3-VH1-L4-Fc;
   [0326] VL1-L1-VH2-L2-VL2-L3-VH1-L4-Fc;
   [0327] VH1-L5-VH2-L6-VL2-L7-VL1-L8-Fc; or
   [0328] VH1-L5-VL2-L6-VH2-L7-VL1-L8-Fc;
[0329] wherein the second polypeptide has a structure represented by:
   [0330] VH3-L9-VH4-CH1-Fc; or
   [0331] VH4-L9-VH3-CH1-Fc;
[0332] wherein the third polypeptide has a structure represented by:
   [0333] VL3-L10-VL4-CL; or
   [0334] VL4-L10-VL3-CL;
[0335] wherein
   [0336] VL1 is a first immunoglobulin light chain variable region; VL2 is a second immunoglobulin light chain variable region; VL3 is a third immunoglobulin light chain variable region; VL4 is a fourth immunoglobulin light chain variable region; VH1 is a first immunoglobulin heavy chain variable region; VH2 is a second immunoglobulin heavy chain variable region; VH3 is a third immunoglobulin heavy chain variable region; VH4 is a fourth immunoglobulin heavy chain variable region; Fc is a region comprising an immunoglobulin heavy chain constant region 2 (CH2), an immunoglobulin heavy chain constant region 3 (CH3), and optionally, an immunoglobulin hinge; CH1 is an immunoglobulin heavy chain constant region 1; CL is an immunoglobulin light chain constant region; and L1-L10 are amino acid linkers.
[0337] 2. The antigen binding polypeptide complex according to clause 1, wherein the first polypeptide has a structure represented by: VL1-L1-VH1-L2-Fc; or VH1-L3-VL1-L4-Fc; wherein the second polypeptide has a structure represented by: VH2-L5-VH3-L6-CH1-L7-Fc; and wherein the third polypeptide has a structure represented by: VL2-L8-VL3-L9-CL.
[0338] 3. The antigen binding polypeptide complex according to clause 1, wherein
[0339] (a) the first polypeptide has a structure represented by VL1-L1-VL2-L2-VH2-L3-VH1-L4-Fc or VH1-L5-VL2-L6-VH2-L7-VL1-L8-Fc; wherein the second polypeptide has a structure represented by VH3-L9-VH4-L10-CH1-L11-Fc; and wherein the third polypeptide has a structure represented by VL3-L12-VL4-L13-CL, or
[0340] (b) the first polypeptide has a structure represented by VL1-L1-VL2-L2-VH2-L3-VH1-L4-Fc or VH1-L5-VL2-L6-VH2-L7-VL1-L8-Fc; wherein the second polypeptide has a structure represented by VH3-L9-VH4-CH1-Fc; and wherein the third polypeptide has a structure represented by VL3-L10-VL4-CL.
[0341] 4. The antigen binding polypeptide complex according to clause 1, wherein
[0342] (a) the first polypeptide has a structure represented by: VL1-L1-VL2-L2-VH2-L3-VH1-L4-Fc; or VH1-L5-VH2-L6-VL2-L7-VL1-L8-Fc; wherein the second polypeptide has a structure represented by: VH3-L9-VH4-L10-CH1-L11-Fc; wherein the third polypeptide has a structure represented by: VL3-L12-VL4-L13-CL or
[0343] (b) the first polypeptide has a structure represented by: VL1-L1-VL2-L2-VH2-L3-VH1-L4-Fc; or VH1-L5-VH2-L6-VL2-L7-VL1-L8-Fc; wherein the second polypeptide has a structure represented by: VH3-L9-VH4-CH1-Fc; wherein the third polypeptide has a structure represented by: VL3-L10-VL4-CL.
[0344] 5. An antigen binding polypeptide complex comprising a first polypeptide, a second polypeptide, a third polypeptide, and a fourth polypeptide;
[0345] wherein the first polypeptide has a structure represented by:
   [0346] VL1-L1-CL or
   [0347] VH1-L1-CL;
[0348] wherein the second polypeptide has a structure represented by:
   [0349] VH1-L2-CH1-L3-Fc or
   [0350] VL1-L2-CH1-L3-Fc;
[0351] wherein the third polypeptide has a structure represented by:
   [0352] VH2-L4-VH3-L5-CH1-L6-Fc or
   [0353] VH3-L4-VH2-L5-CH1-L6-Fc;
[0354] wherein the fourth polypeptide has a structure represented by:
   [0355] VL2-L7-VL3-L8-CL or
   [0356] VL3-L7-VL2-L8-CL;
[0357] wherein:
[0358] VL1 is a first immunoglobulin light chain variable region; VL2 is a second immunoglobulin light chain variable region; VL3 is a third immunoglobulin light chain variable region; VH1 is a first immunoglobulin heavy chain variable region; VH2 is a second immunoglobulin heavy chain variable region; VH3 is a third immunoglobulin heavy chain variable region; Fc is a region comprising an immunoglobulin heavy chain constant region 2 (CH2), an immunoglobulin heavy chain constant region 3 (CH3), and optionally, an immunoglobulin hinge; CH1 is an immunoglobulin heavy chain constant region 1; CL is an immunoglobulin light chain constant region; and L1-L8 are amino acid linkers.
[0359] 6. The antigen binding polypeptide complex according to clause 5, wherein the first polypeptide has a structure represented by: VL1-L1-CL; wherein the second polypeptide has a structure represented by: VH1-L2-CH1-L3-Fc; wherein the third polypeptide has a structure represented by: VH2-L4-VH3-L5-CH1-L6-Fc; wherein the fourth polypeptide has a structure represented by: VL2-L7-VL3-L8-CL.
[0360] 7. An antigen binding polypeptide complex comprising a first polypeptide and a second polypeptide;
[0361] wherein the first polypeptide has a structure represented by:
   [0362] VL1-L1-VL2-L2-VH2-L3-VH1-L4-Fc;
   [0363] VL1-L1-VH2-L2-VL2-L3-VH1-L4-Fc;
   [0364] VH1-L5-VH2-L6-VL2-L7-VL1-L8-Fc;
   [0365] VH1-L5-VL2-L6-VH2-L7-VL1-L8-Fc;
   [0366] VL1-L1-VL2-L2-VH2-L3-VH1-L4-CH1-L5-Fc;
   [0367] VL1-L1-VH2-L2-VL2-L3-VH1-L4-CH1-L5-Fc;
   [0368] VH1-L6-VH2-L7-VL2-L8-VL1-L9-CH1-L10-Fc;
   [0369] VH1-L6-VL2-L7-VH2-L8-VL1-L9-CH1-L10-Fc;
   [0370] VL1-L11-VL2-L12-VH2-L13-VH1-L14-CL-L15-Fc;
   [0371] VL1-L11-VH2-L12-VL2-L13-VH1-L14-CL-L15-Fc;
   [0372] VH1-L16-VH2-L17-VL2-L18-VL1-L19-CL-L20-Fc;
   [0373] VH1-L16-VL2-L17-VH2-L18-VL1-L19-CL-L20-Fc;
   [0374] VL1-L21-VL2-L22-VH2-L23-VH1-L24-CH1-L25-CL-L26-Fc;
   [0375] VL1-L21-VH2-L22-VL2-L23-VH1-L24-CH1-L25-CL-L26-Fc;
   [0376] VH1-L27-VH2-L28-VL2-L29-VL1-L30-CH1-L31-CL-L32-Fc;
   [0377] VH1-L27-VL2-L28-VH2-L29-VL1-L30-CH1-L31-CL-L32-Fc;
   [0378] VL1-L33-VL2-L34-VH2-L35-VH1-L36-CL-L37-CH1-L38-Fc;
   [0379] VL1-L33-VH2-L34-VL2-L35-VH1-L36-CL-L37-CH1-L38-Fc;
   [0380] VH1-L39-VH2-L40-VL2-L41-VL1-L42-CL-L43-CH1-L44-Fc; or
   [0381] VH1-L39-VL2-L40-VH2-L41-VL1-L42-CL-L43-CH1-L44-Fc;
[0382] wherein the second polypeptide has a structure represented by:
   [0383] VL3-L9-VL4-L10-VH4-L11-VH3-L12-Fc;
   [0384] VL3-L9-VH4-L10-VL4-L11-VH3-L12-Fc;
   [0385] VH3-L13-VH4-L14-VL4-L15-VL3-L16-Fc;
   [0386] VH3-L13-VL4-L14-VH4-L15-VL3-L16-Fc
   [0387] VL3-L45-VL4-L46-VH4-L47-VH3-L48-CH1-L49-Fc;
   [0388] VL3-L45-VH4-L46-VL4-L47-VH3-L48-CH1-L49-Fc;
   [0389] VH3-L50-VH4-L51-VL4-L52-VL3-L53-CH1-L54-Fc;
   [0390] VH3-L50-VL4-L51-VH4-L52-VL3-L53-CH1-L54-Fc;
   [0391] VL3-L55-VL4-L56-VH4-L57-VH3-L58-CL-L59-Fc;
   [0392] VL3-L55-VH4-L56-VL4-L57-VH3-L58-CL-L59-Fc;
   [0393] VH3-L60-VH4-L61-VL4-L62-VL3-L63-CL-L64-Fc;
   [0394] VH3-L60-VL4-L61-VH4-L62-VL3-L63-CL-L64-Fc;
   [0395] VL3-L65-VL4-L66-VH4-L67-VH3-L68-CH1-L69-CL-L70-Fc;
   [0396] VL3-L65-VH4-L66-VL4-L67-VH3-L68-CH1-L69-CL-L70-Fc;
   [0397] VH3-L71-VH4-L72-VL4-L73-VL3-L74-CH1-L75-CL-L76-Fc;
   [0398] VH3-L71-VL4-L72-VH4-L73-VL3-L74-CH1-L75-CL-L76-Fc;
   [0399] VL3-L77-VL4-L78-VH4-L79-VH3-L80-CL-L81-CH1-L82-Fc;
   [0400] VL3-L77-VH4-L78-VL4-L79-VH3-L80-CL-L81-CH1-L82-Fc;
   [0401] VH3-L83-VH4-L84-VL4-L85-VL3-L86-CL-L87-CH1-L88-Fc; or
   [0402] VH3-L83-VL4-L84-VH4-L85-VL3-L86-CL-L87-CH1-L88-Fc;
[0403] wherein:
[0404] VL1 is a first immunoglobulin light chain variable region that specifically binds to a tumor-associated antigen; VL2 is a second immunoglobulin light chain variable region that specifically binds to a tumor-associated antigen; VL3 is a third immunoglobulin light chain variable region that specifically binds to CD3; VL4 is a fourth immunoglobulin light chain variable region that specifically binds to a tumor-associated antigen; VH1 is a first immunoglobulin heavy chain variable region that specifically binds to a tumor-associated antigen; VH2 is a second immunoglobulin heavy chain variable region that specifically binds to a tumor-associated antigen; VH3 is a third immunoglobulin heavy chain variable region that specifically binds to CD3; VH4 is a fourth immunoglobulin heavy chain variable region that specifically binds to a tumor-associated antigen; Fc is a region comprising an immunoglobulin heavy chain constant region 2 (CH2), an immunoglobulin heavy chain constant region 3 (CH3), and optionally, an immunoglobulin hinge; CH1 is an immunoglobulin heavy chain constant region 1; CL is an immunoglobulin light chain constant region; and L1-L88 are amino acid linkers.
[0405] 8. The antigen binding polypeptide complex according to clause 7, wherein the first polypeptide has a structure represented by: VL1-L1-VL2-L2-VH2-L3-VH1-L4-Fc; or VH1-L5-VH2-L6-VL2-L7-VL1-L8-Fc; wherein the second polypeptide has a structure represented by: VL3-L9-VL4-L10-VH4-L11-VH3-L12-Fc; or VH3-L13-VH4-L14-VL4-L15-VL3-L16-Fc.
[0406] 9. An antigen binding polypeptide complex according to clause 7, wherein the first polypeptide has a structure represented by:
   [0407] VL1-L1-VL2-L2-VH2-L3-VH1-L4-CH1-L5-Fc;
   [0408] VH1-L6-VH2-L7-VL2-L8-VL1-L9-CH1-L10-Fc;
   [0409] VL1-L11-VL2-L12-VH2-L13-VH1-L14-CL-L15-Fc;
   [0410] VH1-L16-VH2-L17-VL2-L18-VL1-L19-CL-L20-Fc;
   [0411] VL1-L21-VL2-L22-VH2-L23-VH1-L24-CH1-L25-CL-L26-Fc;
   [0412] VH1-L27-VH2-L28-VL2-L29-VL1-L30-CH1-L31-CL-L32-Fc;
   [0413] VL1-L33-VL2-L34-VH2-L35-VH1-L36-CL-L37-CH1-L38-Fc; or
   [0414] VH1-L39-VH2-L40-VL2-L41-VL1-L42-CL-L43-CH1-L44-Fc;
[0415] wherein the second polypeptide has a structure represented by:
   [0416] VL3-L45-VL4-L46-VH4-L47-VH3-L48-CH1-L49-Fc;
   [0417] VH3-L50-VH4-L51-VL4-L52-VL3-L53-CH1-L54-Fc;
   [0418] VL3-L55-VL4-L56-VH4-L57-VH3-L58-CL-L59-Fc;
   [0419] VH3-L60-VH4-L61-VL4-L62-VL3-L63-CL-L64-Fc;
   [0420] VL3-L65-VL4-L66-VH4-L67-VH3-L68-CH1-L69-CL-L70-Fc;
   [0421] VH3-L71-VH4-L72-VL4-L73-VL3-L74-CH1-L75-CL-L76-Fc;
   [0422] VL3-L77-VL4-L78-VH4-L79-VH3-L80-CL-L81-CH1-L82-Fc; or
   [0423] VH3-L83-VH4-L84-VL4-L85-VL3-L86-CL-L87-CH1-L88-Fc.
[0424] 10. The antigen binding polypeptide complex of any one of clauses 1 to 9, wherein one or more linkers L1-L88 has a length of from 0 amino acids to about 50 amino acids.
[0425] 11. The antigen binding polypeptide complex of any one of clauses 1 to 10, wherein one or more linkers L1-L88 is non-immunogenic.
[0426] 12. The antigen binding polypeptide complex of any one of clauses 1 to 11, wherein one or more linkers L1-L88 does not contain a consensus T cell epitope.
[0427] 13. The antigen binding polypeptide complex of any one of clauses 1 to 12, wherein one or more linkers L1-L88 is a cleavable linker.
[0428] 14. The antigen binding polypeptide complex of clause 13, wherein the cleavable linker is cleaved by a matrix metalloprotease (MMP), a type II transmembrane serine protease, or a MMP and a type II transmembrane serine protease.
[0429] 15. The antigen binding polypeptide complex of clause 14, wherein the MMP is MMP1, MMP2, MMP7, MMP8, MMP9, MMP13, or a combination thereof.
[0430] 16. The antigen binding polypeptide complex of clause 14, wherein the type II transmembrane serine protease is a matriptase, hepsin, or a combination thereof.
[0431] 17. The antigen binding polypeptide complex of clause 16, wherein the matriptase is matriptase 1, matriptase 2, matriptase 3, or a combination thereof.
[0432] 18. The antigen binding polypeptide complex of clause 13, wherein the cleavable linker is cleaved by urokinase or legumain.
[0433] 19. The antigen binding polypeptide complex of clause 13, wherein the cleavable linker is GPAALV (SEQ ID NO: 22), GSGRKG (SEQ ID NO: 23), GPLGLTG (SEQ ID NO: 24), GPSGLVG (SEQ ID NO: 25), GLVGRKAG (SEQ ID NO: 26), GPAGLVG (SEQ ID NO: 27), GPAGLVSG (SEQ ID NO: 28), STRKAGG (SEQ ID NO: 29), ASTRKAG (SEQ ID NO: 30), or ASTRKAGG (SEQ ID NO: 31), or a sequence having at least 50%, at least 60%, at least 70%, at least 80%, at least 90%, or at least 95% identity to any one of SEQ ID NOs:22-31, 444, 567, 576 (GGS) and 607.
[0434] 20. The antigen binding polypeptide complex of any one of clauses 1 to 19, wherein one or more of linkers L1-L88 comprise the amino acid sequence of g, a, gss, asg, ggssg (SEQ ID NO: 1), gssgs (SEQ ID NO: 2), gtvaa (SEQ ID NO: 3), asggs (SEQ ID NO: 4), astgg (SEQ ID NO: 5), ggsgs (SEQ ID NO: 6), asggsg (SEQ ID NO: 7), ggsgssg (SEQ ID NO: 8), ggsggssgss (SEQ ID NO: 9), sggsgssggs (SEQ ID NO: 10), ggsggsgsgggsasgsg (SEQ ID NO: 11), ggsggsgsggggsasgsg (SEQ ID NO: 12), gggssggggsggsgsggsgs (SEQ ID NO: 13), ggggsggsgsggggsasgsg (SEQ ID NO: 14), gggssggsgsggsgsggsgs (SEQ ID NO: 15), sggssggsgsggsgsggsgssg (SEQ ID NO: 16), gsgssggggsggsgsggsgssg (SEQ ID NO: 17), ggggsgsggsgggssggggsggggsggggsggggsggggs (SEQ ID NO: 18), ggggsggggsggggsggggsggggsggggsggggsggggs (SEQ ID NO: 19), ggggsgsggsgggssggggsggggsggggsggggsggggssss (SEQ ID NO: 20), or ggggsgsggsgggssggggsggggsggggsggggsggggssssgs (SEQ ID NO: 21), or any one of SEQ ID NOs: 444, 567, 576 (GGS) and 607, or a sequence having at least 50%, at least 60%, at least 70%, at least 80%, at least 90%, or at least 95% identity to any one of SEQ ID NOs:1-21, 444, 567, 576 (GGS) and 607.
[0435] 21. The antigen binding polypeptide complex of any one of clauses 1 to 20, wherein one of VH1, VH2, VH3 or VH4 specifically binds to CD3.
[0436] 22. The antigen binding polypeptide complex of any one of clauses 1 to 21, wherein one of VL1, VL2, VL3 or VL4 specifically binds to CD3.
[0437] 23. The antigen binding polypeptide complex of any one of clauses 1 to 22, wherein VH1 and VL1, VH2 and VL2, VH3 and VL3, or VH4 and VL4 specifically binds to CD3.
[0438] 24. The antigen binding polypeptide complex of any one of clauses 1 to 23,
[0439] wherein the VH1, VH2, VH3 or VH4 that specifically binds to CD3 comprises a CDR1 comprising an amino acid sequence having at least 90% identity, at least 95% identity, or 100% identity to any one of SEQ ID NOs:32, 40, 99, 433, 524, 667, 703, 739, 767, 803. 839, 851 and 859; a CDR2 comprising an amino acid sequence having at least 90% identity, at least 95% identity, or 100% identity to any one of SEQ ID NOs:33, 41, 100, 434, 525, 668, 704, 740, 768, 804, 840, 852 and 860; and a CDR3 comprising an amino acid sequence having at least 90% identity, at least 95% identity, or 100% identity to any one of SEQ ID NOs:34, 42, 101, 435, 526, 669, 705, 741, 769, 805, 841, 853 and 861; and
[0440] wherein the VL1, VL2, VL3 or VL4 that specifically binds to CD3 comprises a CDR1 comprising an amino acid sequence having at least 90% identity, at least 95% identity, or 100% identity to any one of SEQ ID NOs:35, 44, 96, 446, 456, 466, 476, 520, 663, 699, 735, 763, 799, 835, 855 and 863; a CDR2 comprising an amino acid sequence having at least 90% identity, at least 95% identity, or 100% identity to any one of SEQ ID NOs:36, 45, 97, 447 (DT), 457 (DT), 467 (DT), 477 (DT), 521, 664, 700, 736, 764, 800, 836, 856 and 864; and a CDR3 comprising an amino acid sequence having at least 90% identity, at least 95% identity, or 100% identity to any one of SEQ ID NOs:37, 46, 98, 448, 458, 468, 478, 522, 665, 701, 737, 765, 801, 837, 857 and 865.
[0441] 25. The antigen binding polypeptide complex of clause 24,
[0442] wherein the VH1, VH2, VH3 or VH4 that specifically binds to CD3 comprises a CDR1 comprising an amino acid sequence having at least 90% identity to SEQ ID NO: 40; a CDR2 comprising an amino acid sequence having at least 90% identity to SEQ ID NO: 41; and a CDR3 comprising an amino acid sequence having at least 90% identity to SEQ ID NO: 42; and wherein the VL1, VL2, VL3 or VL4 that specifically binds to CD3 comprises a CDR1 comprising an amino acid sequence having at least 90% identity to SEQ ID NO: 44; a CDR2 comprising an amino acid sequence having at least 90% identity to SEQ ID NO: 45; and a CDR3 comprising an amino acid sequence having at least 90% identity to SEQ ID NO: 46;
[0443] optionally wherein the VH1, VH2, VH3 or VH4 that specifically binds to CD3 comprises a CDR1 comprising the amino acid sequence of SEQ ID NO: 40; a CDR2 comprising the amino acid sequence of SEQ ID NO: 41; and a CDR3 comprising the amino acid sequence of SEQ ID NO: 42; and wherein the VL1, VL2, VL3 or VL4 that specifically binds to CD3 comprises a CDR1 comprising the amino acid sequence of SEQ ID NO: 44; a CDR2 comprising the amino acid sequence of SEQ ID NO: 45; and a CDR3 comprising the amino acid sequence of SEQ ID NO: 46.
[0444] 26. The antigen binding polypeptide complex of clause 24, wherein the VH1, VH2, VH3 or VH4 that specifically binds to CD3 comprises a CDR1 comprising an amino acid sequence having at least 90% identity to SEQ ID NO: 32; a CDR2 comprising an amino acid sequence having at least 90% identity to SEQ ID NO: 33; and a CDR3 comprising an amino acid sequence having at least 90% identity to SEQ ID NO: 34; and wherein the VL1, VL2, VL3 or VL4 that specifically binds to CD3 comprises a CDR1 comprising an amino acid sequence having at least 90% identity to SEQ ID NO: 35; a CDR2 comprising an amino acid sequence having at least 90% identity to SEQ ID NO: 36; and a CDR3 comprising an amino acid sequence having at least 90% identity to SEQ ID NO: 37;
[0445] optionally wherein the VH1, VH2, VH3 or VH4 that specifically binds to CD3 comprises a CDR1 comprising the amino acid sequence of SEQ ID NO: 32; a CDR2 comprising the amino acid sequence of SEQ ID NO: 33; and a CDR3 comprising the amino acid sequence of SEQ ID NO: 34; and wherein the VL1, VL2, VL3 or VL4 that specifically binds to CD3 comprises a CDR1 comprising the amino acid sequence of SEQ ID NO: 35 a CDR2 comprising the amino acid sequence of SEQ ID NO: 36; and a CDR3 comprising the amino acid sequence of SEQ ID NO: 37.
[0446] 27. The antigen binding polypeptide complex of any one of clauses 1 to 24, wherein the VH1, VH2, VH3 or VH4 that specifically binds to CD3 comprises an amino acid sequence having at least 80%, at least 85%, at least 90%, at least 95%, or 100% identity to any one of SEQ ID NOs:38, 43, 102, 423, 432, 523, 666, 702, 738, 766, 802, 838, 850 and 858, and the VL1, VL2, VL3 or VL4 that specifically binds to CD3 comprises an amino acid sequence having at least 80%, at least 85%, at least 90%, at least 95%, or 100% identity to any one of SEQ ID NOs:39, 47, 103, 422, 445, 455, 465, 475, 519, 662, 698, 734, 762, 798, 834, 854 and 862.
[0447] 28. The antigen binding polypeptide complex of clause 27, wherein the VH1, VH2, VH3 or VH4 that specifically binds to CD3 comprises an amino acid sequence having at least 80% identity to SEQ ID NO: 43, and the VL1, VL2, VL3 or VL4 that specifically binds to CD3 comprises an amino acid sequence having at least 80% identity to SEQ ID NO: 47; optionally wherein the VH1, VH2, VH3 or VH4 that specifically binds to CD3 comprises the amino acid sequence of SEQ ID NO: 43, and the VL1, VL2, VL3 or VL4 that specifically binds to CD3 comprises the amino acid sequence of SEQ ID NO: 47.
[0448] 29. The antigen binding polypeptide complex of clause 27, wherein the VH1, VH2, VH3 or VH4 that specifically binds to CD3 comprises an amino acid sequence having at least 80% identity to SEQ ID NO: 38, and the VL1, VL2, VL3 or VL4 that specifically binds to CD3 comprises an amino acid sequence having at least 80% identity to SEQ ID NO: 39; optionally wherein the VH1, VH2, VH3 or VH4 that specifically binds to CD3 comprises the amino acid sequence of SEQ ID NO: 38, and the VL1, VL2, VL3 or VL4 that specifically binds to CD3 comprises the amino acid sequence of SEQ ID NO: 39.
[0449] 30. The antigen binding polypeptide complex of any one of clauses 1 to 29, wherein one or more of VH1, VH2, VH3 or VH4 specifically binds to a tumor-associated antigen (TAA).
[0450] 31. The antigen binding polypeptide complex of anyone of clauses 1 to 30, wherein one or more of VL1, VL2, VL3 or VL4 specifically binds to a TAA.
[0451] 32. The antigen binding polypeptide complex of any one of clauses 1 to 31, wherein VH1 and VL1, VH2 and VL2, VH3 and VL3, and/or VH4 and VL4 specifically binds to a TAA.
[0452] 33. The antigen binding polypeptide complex of any one of clauses 30 to 32, wherein the TAA is A2AR, APRIL, ATPDase, BAFF, BAFFR, BCMA, BlyS, BTK, BTLA, B7DC, B7H1, B7H2, B7H3, B7H4, B7H5, B7H6, B7H7, B7RP1, B7-4, C3, C5, CCL2, CCL3, CCL4, CCL5, CCL7, CCL8, CCL11, CCL15, CCL17, CCL19, CCL20, CCL21, CCL25, CCR3, CCR4, CD16A, CD19, CD20, CD24, CD27, CD28, CD30, CD38, CD39, CD40, CD40L, CD47, CD52, CD70, CD80, CD86, CD123, CD133, CD137, CD137L, CD160, CD272, CEACAM5, CLEC9, CLEC91, CRTH2, CSF-1, CSF-2, CSF-3, CXCL1, CXCL2, CXCL4, CXCL12, CXCL13, CXCR3, cMet, CTLA4, DLL3, DLL4, DNGR-1, E-cadherin, EGFR, ENTPD1, EpCAM, FCER1, FCER1A, FCER2, FGFR, FLAP, FOLH1, Gi24, GITR, GITRL, GPR5, GP100, GPRC5D, HER2, HER3, ICOSL, ICOS, HHLA2, HMGB1, HVEM, IDO, IFNa, IgE, IGF1R, IL2Rbeta, IL1, ILIA, IL1B, IL1F10, IL2, IL4, IL4Ra, IL5, IL5R, IL6, IL7, IL7Ra, IL8, IL9, IL9R, IL10, rhILlO, IL12, IL13, IL13Ra1, IL13Ra2, IL15, IL17, IL17Rb, IL18, IL22, IL23, IL25, IL7, IL33, IL35, ITGB4, ITK, KIR, LAG3, LAMP1, leptin, LPFS2, MHC class II, MUC-1, MUC-16, NCR3LG1, NKG2D, NKp46, NTPDase-1, OX40, OX40L, PD-1, PD-L1, PD-L2, PROM1, S152, SIRPalpha, SISP1, SLC, SPG64, ST2, STEAP1, STEAP2, Syk kinase, STEAP1, TROP2, TACI, TDO, TGFBETA, T14, TIGIT, TIM3, TLR, TLR2, TLR4, TLR5, TLR9, TMEF1, TNFa, TNFRSF7, Tp55, TREM1, TSLP, TSLPR, TWEAK, VEGF, VISTA, Vstm3, or WUCAM.
[0453] 34. The antigen binding polypeptide complex of clause 33, wherein the TAA is cMet, Trop2, CD20, or CD19.
[0454] 35. The antigen binding polypeptide complex of any one of clauses 30 to 34, wherein the one or more of VH1, VH2, VH3 or VH4 that specifically binds to a TAA comprises a CDR1 comprising an amino acid sequence having at least 90% identity, at least 95% identity, or 100% identity to any one of SEQ ID NOs:64, 72, 80, 88, 104, 112, 120, 128, 389, 409, 419, 429, 659, 695, 731, 397, 508, 540, 552, 757, 793, 829, 875, 500, 749, 785, 821, 649, 685, 775, 847, 625, 641, 677 and 713; a CDR2 comprising an amino acid sequence having at least 90% identity, at least 95% identity, or 100% identity to any one of SEQ ID NOs:65, 73, 81, 89, 105, 113, 121, 129, 390, 410, 420, 430, 660, 696, 732, 398, 509, 541, 553, 758, 794, 830, 876, 501, 750, 786, 822, 650, 686, 776, 848, 626, 642, 678 and 714; and a CDR3 comprising an amino acid sequence having at least 90% identity, at least 95% identity, or 100% identity to any one of SEQ ID NOs:66, 74, 82, 90, 106, 114, 122, 130, 391, 411, 421, 431, 661, 697, 733, 399, 510, 542, 554, 759, 795, 831, 877, 502, 751, 787, 823, 651, 687, 777, 849, 627, 643, 679 and 715; and/or
[0455] wherein the one or more of VL1, VL2, VL3 or VL4 that specifically binds to a TAA comprises a CDR1 comprising an amino acid sequence having at least 90% identity, at least 95% identity, or 100% identity to any one of SEQ ID NOs:67, 75, 83, 91, 107, 115, 123, 131, 385, 405, 415, 441, 452, 462, 472, 655, 691, 727, 393, 486, 504, 536, 548, 753, 789, 825, 871, 879, 490, 496, 745, 781, 817, 645, 681, 771, 843, 621, 637, 673 and 709; a CDR2 comprising an amino acid sequence having at least 90% identity, at least 95% identity, or 100% identity to any one of SEQ ID NOs:68, 76, 84, 92, 108, 116, 124, 132, 386 (YTS); 406 (YTS), 416 (YTS), 442 (YTS), 453 (YTS), 463 (YTS), 473 (YTS), 656, 692, 728, 394, 487 (AT), 505 (AT), 537, 549, 754, 790, 826, 872, 880, 491 (DA), 497 (DA), 746, 782, 818, 646, 682, 772, 844, 622, 638, 674 and 710; and a CDR3 comprising an amino acid sequence having at least 90% identity, at least 95% identity, or 100% identity to any one of SEQ ID NOs:69, 77, 85, 93, 109, 117, 125, 133, 387, 407, 417, 443, 454, 464, 474, 657, 693, 729, 395, 488, 506, 538, 550, 755, 791, 827, 873, 881, 492, 498, 747, 783, 819, 647, 683, 773, 845, 623, 639, 675 and 711.
[0456] 36. The antigen binding polypeptide complex of clause 35, wherein the one or more of VH1, VH2, VH3 or VH4 specifically binds to CD38 and comprises a CDR1 comprising an amino acid sequence having at least 90% identity to SEQ ID NO: 64; a CDR2 comprising an amino acid sequence having at least 90% identity to SEQ ID NO: 65; and a CDR3 comprising an amino acid sequence having at least 90% identity to SEQ ID NO: 66; and wherein the one or more of VL1, VL2, VL3 or VL4 specifically binds to CD38 and comprises a CDR1 comprising an amino acid sequence having at least 90% identity to SEQ ID NO: 67; a CDR2 comprising an amino acid sequence having at least 90% identity to SEQ ID NO: 68; and a CDR3 comprising an amino acid sequence having at least 90% identity to SEQ ID NO: 69;
[0457] optionally wherein the VH1, VH2, VH3 or VH4 that specifically binds to CD38 comprises a CDR1 comprising the amino acid sequence of SEQ ID NO: 64; a CDR2 comprising the amino acid sequence of SEQ ID NO: 65; and a CDR3 comprising the amino acid sequence of SEQ ID NO: 66; and wherein the VL1, VL2, VL3 or VL4 that specifically binds to CD38 comprises a CDR1 comprising the amino acid sequence of SEQ ID NO: 67; a CDR2 comprising the amino acid sequence of SEQ ID NO: 68; and a CDR3 comprising the amino acid sequence of SEQ ID NO: 69.
[0458] 37. The antigen binding polypeptide complex of clause 35, wherein the one or more of VH1, VH2, VH3 or VH4 specifically binds to cMet and comprises a CDR1 comprising an amino acid sequence having at least 90% identity to SEQ ID NO: 72; a CDR2 comprising an amino acid sequence having at least 90% identity to SEQ ID NO: 73; and a CDR3 comprising an amino acid sequence having at least 90% identity to SEQ ID NO: 74; and wherein the one or more of VL1, VL2, VL3 or VL4 specifically binds to cMet and comprises a CDR1 comprising an amino acid sequence having at least 90% identity to SEQ ID NO: 75; a CDR2 comprising an amino acid sequence having at least 90% identity to SEQ ID NO: 76; and a CDR3 comprising an amino acid sequence having at least 90% identity to SEQ ID NO: 77;
[0459] optionally wherein the VH1, VH2, VH3 or VH4 that specifically binds to cMet comprises a CDR1 comprising the amino acid sequence of SEQ ID NO: 72; a CDR2 comprising the amino acid sequence of SEQ ID NO: 73; and a CDR3 comprising the amino acid sequence of SEQ ID NO: 74; and wherein the VL1, VL2, VL3 or VL4 that specifically binds to cMet comprises a CDR1 comprising the amino acid sequence of SEQ ID NO: 75; a CDR2 comprising the amino acid sequence of SEQ ID NO: 76; and a CDR3 comprising the amino acid sequence of SEQ ID NO: 77.
[0460] 38. The antigen binding polypeptide complex of clause 35, wherein the one or more of VH1, VH2, VH3 or VH4 specifically binds to Trop2 and comprises a CDR1 comprising an amino acid sequence having at least 90% identity to SEQ ID NO: 80; a CDR2 comprising an amino acid sequence having at least 90% identity to SEQ ID NO: 81; and a CDR3 comprising an amino acid sequence having at least 90% identity to SEQ ID NO: 82; and wherein the one or more of VL1, VL2, VL3 or VL4 specifically binds to Trop2 and comprises a CDR1 comprising an amino acid sequence having at least 90% identity to SEQ ID NO: 83; a CDR2 comprising an amino acid sequence having at least 90% identity to SEQ ID NO: 84; and a CDR3 comprising an amino acid sequence having at least 90% identity to SEQ ID NO: 85;
[0461] optionally wherein the VH1, VH2, VH3 or VH4 that specifically binds to Trop2 comprises a CDR1 comprising the amino acid sequence of SEQ ID NO: 80; a CDR2 comprising the amino acid sequence of SEQ ID NO: 81; and a CDR3 comprising the amino acid sequence of SEQ ID NO: 82; and wherein the VL1, VL2, VL3 or VL4 that specifically binds to Trop2 comprises a CDR1 comprising the amino acid sequence of SEQ ID NO: 83; a CDR2 comprising the amino acid sequence of SEQ ID NO: 84; and a CDR3 comprising the amino acid sequence of SEQ ID NO: 85.
[0462] 39. The antigen binding polypeptide complex of clause 35, wherein the one or more of VH1, VH2, VH3 or VH4 specifically binds to Trop2 and comprises a CDR1 comprising an amino acid sequence having at least 90% identity to SEQ ID NO: 88; a CDR2 comprising an amino acid sequence having at least 90% identity to SEQ ID NO: 89; and a CDR3 comprising an amino acid sequence having at least 90% identity to SEQ ID NO: 90; and wherein the one or more of VL1, VL2, VL3 or VL4 specifically binds to Trop2 and comprises a CDR1 comprising an amino acid sequence having at least 90% identity to SEQ ID NO: 91; a CDR2 comprising an amino acid sequence having at least 90% identity to SEQ ID NO: 92; and a CDR3 comprising an amino acid sequence having at least 90% identity to SEQ ID NO: 93;
[0463] optionally wherein the VH1, VH2, VH3 or VH4 that specifically binds to Trop2 comprises a CDR1 comprising the amino acid sequence of SEQ ID NO: 88; a CDR2 comprising the amino acid sequence of SEQ ID NO: 89; and a CDR3 comprising the amino acid sequence of SEQ ID NO: 90; and wherein the VL1, VL2, VL3 or VL4 that specifically binds to Trop2 comprises a CDR1 comprising the amino acid sequence of SEQ ID NO: 91; a CDR2 comprising the amino acid sequence of SEQ ID NO: 92; and a CDR3 comprising the amino acid sequence of SEQ ID NO: 93.
[0464] 40. The antigen binding polypeptide complex of clause 35, wherein the one or more of VH1, VH2, VH3 or VH4 that specifically binds to CD3 and comprises a CDR1 comprising an amino acid sequence having at least 90% identity to SEQ ID NO: 96; a CDR2 comprising an amino acid sequence having at least 90% identity to SEQ ID NO: 97; and a CDR3 comprising an amino acid sequence having at least 90% identity to SEQ ID NO: 98; and wherein the one or more of VL1, VL2, VL3 or VL4 specifically binds to CD3 and comprises a CDR1 comprising an amino acid sequence having at least 90% identity to SEQ ID NO: 99; a CDR2 comprising an amino acid sequence having at least 90% identity to SEQ ID NO: 100; and a CDR3 comprising an amino acid sequence having at least 90% identity to SEQ ID NO: 101;
[0465] optionally wherein the VH1, VH2, VH3 or VH4 that specifically binds to CD3 comprises a CDR1 comprising the amino acid sequence of SEQ ID NO: 96; a CDR2 comprising the amino acid sequence of SEQ ID NO: 97; and a CDR3 comprising the amino acid sequence of SEQ ID NO: 98; and wherein the VL1, VL2, VL3 or VL4 that specifically binds to CD3 comprises a CDR1 comprising the amino acid sequence of SEQ ID NO: 99; a CDR2 comprising the amino acid sequence of SEQ ID NO: 100; and a CDR3 comprising the amino acid sequence of SEQ ID NO: 101.
[0466] 41. The antigen binding polypeptide complex of clause 35, wherein the one or more of VH1, VH2, VH3 or VH4 specifically binds to CD20 and comprises a CDR1 comprising an amino acid sequence having at least 90% identity to SEQ ID NO: 104; a CDR2 comprising an amino acid sequence having at least 90% identity to SEQ ID NO: 105; and a CDR3 comprising an amino acid sequence having at least 90% identity to SEQ ID NO: 106; and wherein the one or more of VL1, VL2, VL3 or VL4 specifically binds to CD20 and comprises a CDR1 comprising an amino acid sequence having at least 90% identity to SEQ ID NO: 107; a CDR2 comprising an amino acid sequence having at least 90% identity to SEQ ID NO: 108; and a CDR3 comprising an amino acid sequence having at least 90% identity to SEQ ID NO: 109;
[0467] optionally wherein the VH1, VH2, VH3 or VH4 that specifically binds to CD20 comprises a CDR1 comprising the amino acid sequence of SEQ ID NO: 104; a CDR2 comprising the amino acid sequence of SEQ ID NO: 105; and a CDR3 comprising the amino acid sequence of SEQ ID NO: 106; and wherein the VL1, VL2, VL3 or VL4 that specifically binds to CD20 comprises a CDR1 comprising the amino acid sequence of SEQ ID NO: 107; a CDR2 comprising the amino acid sequence of SEQ ID NO: 108; and a CDR3 comprising the amino acid sequence of SEQ ID NO: 109.
[0468] 42. The antigen binding polypeptide complex of clause 35, wherein the one or more of VH1, VH2, VH3 or VH4 specifically binds to CD20 and comprises a CDR1 comprising an amino acid sequence having at least 90% identity to SEQ ID NO: 112; a CDR2 comprising an amino acid sequence having at least 90% identity to SEQ ID NO: 113; and a CDR3 comprising an amino acid sequence having at least 90% identity to SEQ ID NO: 114; and wherein the one or more of VL1, VL2, VL3 or VL4 specifically binds to CD20 and comprises a CDR1 comprising an amino acid sequence having at least 90% identity to SEQ ID NO: 115; a CDR2 comprising an amino acid sequence having at least 90% identity to SEQ ID NO: 116; and a CDR3 comprising an amino acid sequence having at least 90% identity to SEQ ID NO: 117;
[0469] optionally wherein the VH1, VH2, VH3 or VH4 that specifically binds to CD20 comprises a CDR1 comprising the amino acid sequence of SEQ ID NO: 112; a CDR2 comprising the amino acid sequence of SEQ ID NO: 113; and a CDR3 comprising the amino acid sequence of SEQ ID NO: 114; and wherein the VL1, VL2, VL3 or VL4 that specifically binds to CD20 comprises a CDR1 comprising the amino acid sequence of SEQ ID NO: 115; a CDR2 comprising the amino acid sequence of SEQ ID NO: 116; and a CDR3 comprising the amino acid sequence of SEQ ID NO: 117.
[0470] 43. The antigen binding polypeptide complex of clause 35, wherein the one or more of VH1, VH2, VH3 or VH4 specifically binds to CD19 and comprises a CDR1 comprising an amino acid sequence having at least 90% identity to SEQ ID NO: 120; a CDR2 comprising an amino acid sequence having at least 90% identity to SEQ ID NO: 121; and a CDR3 comprising an amino acid sequence having at least 90% identity to SEQ ID NO: 122; and wherein the one or more of VL1, VL2, VL3 or VL4 specifically binds to CD19 and comprises a CDR1 comprising an amino acid sequence having at least 90% identity to SEQ ID NO: 123; a CDR2 comprising an amino acid sequence having at least 90% identity to SEQ ID NO: 124; and a CDR3 comprising an amino acid sequence having at least 90% identity to SEQ ID NO: 125; optionally
[0471] wherein the VH1, VH2, VH3 or VH4 that specifically binds to CD19 comprises a CDR1 comprising the amino acid sequence of SEQ ID NO: 120; a CDR2 comprising the amino acid sequence of SEQ ID NO: 121; and a CDR3 comprising the amino acid sequence of SEQ ID NO: 122; and wherein the VL1, VL2, VL3 or VL4 that specifically binds to CD19 comprises a CDR1 comprising the amino acid sequence of SEQ ID NO: 123; a CDR2 comprising the amino acid sequence of SEQ ID NO: 124; and a CDR3 comprising the amino acid sequence of SEQ ID NO: 125.
[0472] 44. The antigen binding polypeptide complex of clause 35, wherein the one or more of VH1, VH2, VH3 or VH4 specifically binds to CD19 and comprises a CDR1 comprising an amino acid sequence having at least 90% identity to SEQ ID NO: 128; a CDR2 comprising an amino acid sequence having at least 90% identity to SEQ ID NO: 129; and a CDR3 comprising an amino acid sequence having at least 90% identity to SEQ ID NO: 130; and wherein the one or more of VL1, VL2, VL3 or VL4 specifically binds to CD19 and comprises a CDR1 comprising an amino acid sequence having at least 90% identity to SEQ ID NO: 131; a CDR2 comprising an amino acid sequence having at least 90% identity to SEQ ID NO: 132; and a CDR3 comprising an amino acid sequence having at least 90% identity to SEQ ID NO: 133; optionally
[0473] wherein the VH1, VH2, VH3 or VH4 that specifically binds to CD19 comprises a CDR1 comprising the amino acid sequence of SEQ ID NO: 128; a CDR2 comprising the amino acid sequence of SEQ ID NO: 129; and a CDR3 comprising the amino acid sequence of SEQ ID NO: 130; and wherein the VL1, VL2, VL3 or VL4 that specifically binds to CD19 comprises a CDR1 comprising the amino acid sequence of SEQ ID NO: 131; a CDR2 comprising the amino acid sequence of SEQ ID NO: 132; and a CDR3 comprising the amino acid sequence of SEQ ID NO: 133.
[0474] 45. The antigen binding polypeptide complex of any one of clauses 30 to 44, wherein the one or more of VH1, VH2, VH3 or VH4 that specifically binds to a TAA comprises an amino acid sequence having at least 80%, at least 85%, at least 90%, at least 95%, or 100% identity to any one of SEQ ID NOs:70, 78, 86, 94, 102, 110, 118, 126, 134, 388, 408, 418, 428, 584, 658, 694, 730, 396, 403, 507, 539, 551, 756, 792, 828, 866, 874, 499, 544, 556, 748, 784, 820, 883, 528, 648, 684, 774, 846, 624, 640, 676 and 712; and the one or more of VL1, VL2, VL3 or VL4 that specifically binds to a TAA comprises an amino acid sequence having at least 80%, at least 85%, at least 90%, at least 95%, or 100% identity to any one of SEQ ID NOs:71, 79, 87, 95, 103, 111, 119, 127, 135, 384, 404, 414, 440, 451, 461, 471, 583, 654, 690, 726, 392, 402, 485, 503, 535, 547, 752, 788, 824, 870, 878, 489, 495, 543, 555, 744, 780, 882, 816, 527, 644, 680, 770, 842, 620, 636, 672 and 708.
[0475] 46. The antigen binding polypeptide complex of clause 45, wherein the one or more of VH1, VH2, VH3 or VH4 specifically binds to CD38 and comprises a sequence having at least 80% identity to SEQ ID NO: 70 and wherein the one or more of VL1, VL2, VL3 or VL4 specifically binds to CD38 and comprises a sequence having at least 80% identity to SEQ ID NO: 71; optionally wherein the VH1, VH2, VH3 or VH4 that specifically binds to CD38 comprises the amino acid sequence of SEQ ID NO: 70; and wherein the VL1, VL2, VL3 or VL4 that specifically binds to CD38 comprises the amino acid sequence of SEQ ID NO: 71.
[0476] 47. The antigen binding polypeptide complex of clause 45, wherein the one or more of VH1, VH2, VH3 or VH4 specifically binds to cMet and comprises a sequence having at least 80% identity to SEQ ID NO: 78 and wherein the one or more of VL1, VL2, VL3 or VL4 specifically binds to cMet and comprises a sequence having at least 80% identity to SEQ ID NO: 79; optionally wherein the VH1, VH2, VH3 or VH4 that specifically binds to cMet comprises the amino acid sequence of SEQ ID NO: 78; and wherein the VL1, VL2, VL3 or VL4 that specifically binds to cMet comprises the amino acid sequence of SEQ ID NO: 79.
[0477] 48. The antigen binding polypeptide complex of clause 45, wherein the one or more of VH1, VH2, VH3 or VH4 specifically binds to Trop2 and comprises a sequence having at least 80% identity to SEQ ID NO: 86; and wherein the one or more of VL1, VL2, VL3 or VL4 specifically binds to Trop2 and comprises a sequence having at least 80% identity to SEQ ID NO: 87; optionally wherein the VH1, VH2, VH3 or VH4 that specifically binds to Trop2 comprises the amino acid sequence of SEQ ID NO: 86; and wherein the VL1, VL2, VL3 or VL4 that specifically binds to Trop2 comprises the amino acid sequence of SEQ ID NO: 87.
[0478] 49. The antigen binding polypeptide complex of clause 45, wherein the one or more of VH1, VH2, VH3 or VH4 specifically binds to Trop2 and comprises a sequence having at least 80% identity to SEQ ID NO: 94; and wherein the one or more of VL1, VL2, VL3 or VL4 specifically binds to Trop2 and comprises a sequence having at least 80% identity to SEQ ID NO: 95; optionally wherein the VH1, VH2, VH3 or VH4 that specifically binds to Trop2 comprises the amino acid sequence of SEQ ID NO: 94; and wherein the VL1, VL2, VL3 or VL4 that specifically binds to Trop2 comprises the amino acid sequence of SEQ ID NO: 95.
[0479] 50. The antigen binding polypeptide complex of clause 45, wherein the one or more of VH1, VH2, VH3 or VH4 specifically binds to CD3 and comprises a sequence having at least 80% identity to SEQ ID NO: 102; and wherein the one or more of VL1, VL2, VL3 or VL4 specifically binds to CD3 and comprises a sequence having at least 80% identity to SEQ ID NO: 103; optionally wherein the VH1, VH2, VH3 or VH4 that specifically binds to CD3 comprises the amino acid sequence of SEQ ID NO: 102; and wherein the VL1, VL2, VL3 or VL4 that specifically binds to CD3 comprises the amino acid sequence of SEQ ID NO: 103.
[0480] 51. The antigen binding polypeptide complex of clause 45, wherein the one or more of VH1, VH2, VH3 or VH4 specifically binds to CD20 and comprises a sequence having at least 80% identity to SEQ ID NO: 110; and wherein the one or more of VL1, VL2, VL3 or VL4 specifically binds to CD20 and comprises a sequence having at least 80% identity to SEQ ID NO: 111; optionally wherein the VH1, VH2, VH3 or VH4 that specifically binds to CD20 comprises the amino acid sequence of SEQ ID NO: 110; and wherein the VL1, VL2, VL3 or VL4 that specifically binds to CD20 comprises the amino acid sequence of SEQ ID NO: 111.
[0481] 52. The antigen binding polypeptide complex of clause 45, wherein the one or more of VH1, VH2, VH3 or VH4 specifically binds to CD20 and comprises a sequence having at least 80% identity to SEQ ID NO: 110; and wherein the one or more of VL1, VL2, VL3 or VL4 specifically binds to CD20 and comprises a sequence having at least 80% identity to SEQ ID NO: 119; optionally wherein the VH1, VH2, VH3 or VH4 that specifically binds to CD20 comprises the amino acid sequence of SEQ ID NO: 110; and wherein the VL1, VL2, VL3 or VL4 that specifically binds to CD20 comprises the amino acid sequence of SEQ ID NO: 119.
[0482] 53. The antigen binding polypeptide complex of clause 45, wherein the one or more of VH1, VH2, VH3 or VH4 specifically binds to CD20 and comprises a sequence having at least 80% identity to SEQ ID NO: 118; and wherein the one or more of VL1, VL2, VL3 or VL4 specifically binds to CD20 and comprises a sequence having at least 80% identity to SEQ ID NO: 111; optionally wherein the VH1, VH2, VH3 or VH4 that specifically binds to CD20 comprises the amino acid sequence of SEQ ID NO: 118; and wherein the VL1, VL2, VL3 or VL4 that specifically binds to CD20 comprises the amino acid sequence of SEQ ID NO: 111.
[0483] 54. The antigen binding polypeptide complex of clause 45, wherein the one or more of VH1, VH2, VH3 or VH4 specifically binds to CD20 and comprises a sequence having at least 80% identity to SEQ ID NO: 118; and wherein the one or more of VL1, VL2, VL3 or VL4 specifically binds to CD20 and comprises a sequence having at least 80% identity to SEQ ID NO: 119; optionally wherein the VH1, VH2, VH3 or VH4 that specifically binds to CD20 comprises the amino acid sequence of SEQ ID NO: 118; and wherein the VL1, VL2, VL3 or VL4 that specifically binds to CD20 comprises the amino acid sequence of SEQ ID NO: 119.
[0484] 55. The antigen binding polypeptide complex of clause 45, wherein the one or more of VH1, VH2, VH3 or VH4 specifically binds to CD19 and comprises a sequence having at least 80% identity to SEQ ID NO: 126; and wherein the one or more of VL1, VL2, VL3 or VL4 specifically binds to CD19 and comprises a sequence having at least 80% identity to SEQ ID NO: 127; optionally wherein the VH1, VH2, VH3 or VH4 that specifically binds to CD19 comprises the amino acid sequence of SEQ ID NO: 126; and wherein the VL1, VL2, VL3 or VL4 that specifically binds to CD19 comprises the amino acid sequence of SEQ ID NO: 127; or
[0485] wherein the one or more of VH1, VH2, VH3 or VH4 specifically binds to CD19 and comprises a sequence having at least 80% identity to SEQ ID NO:883; and wherein the one or more of VL1, VL2, VL3 or VL4 specifically binds to CD19 and comprises a sequence having at least 80% identity to SEQ ID NO:882; optionally wherein the VH1, VH2, VH3 or VH4 that specifically binds to CD19 comprises the amino acid sequence of SEQ ID NO:883; and wherein the VL1, VL2, VL3 or VL4 that specifically binds to CD19 comprises the amino acid sequence of SEQ ID NO:882.
[0486] 56. The antigen binding polypeptide complex of clause 45, wherein the one or more of VH1, VH2, VH3 or VH4 specifically binds to CD19 and comprises a sequence having at least 80% identity to SEQ ID NO: 134; and wherein the one or more of VL1, VL2, VL3 or VL4 specifically binds to CD19 and comprises a sequence having at least 80% identity to SEQ ID NO: 135; optionally wherein the VH1, VH2, VH3 or VH4 that specifically binds to CD19 comprises the amino acid sequence of SEQ ID NO: 134; and wherein the VL1, VL2, VL3 or VL4 that specifically binds to CD19 comprises the amino acid sequence of SEQ ID NO: 135.
[0487] 57. The antigen binding polypeptide complex of any one of clauses 1 to 56, wherein one or more of VH1, VH2, VH3 or VH4 specifically binds to an immune stimulating receptor.
[0488] 58. The antigen binding polypeptide complex of any one of clauses 1 to 57, wherein one or more of VL1, VL2, VL3 or VL4 specifically binds to an immune stimulating receptor.
[0489] 59. The antigen binding polypeptide complex of any one of clauses 1 to 58, wherein VH1 and VL1, VH2 and VL2, VH3 and VL3, and/or VH4 and VL4 specifically binds to an immune stimulating receptor.
[0490] 60. The antigen binding polypeptide complex of any one of clauses 57 to 59, wherein the immune stimulating receptor is CD28.
[0491] 61. The antigen binding polypeptide complex of any one of clauses 57 to 60, wherein the VH1, VH2, VH3 or VH4 that specifically binds to an immune stimulating receptor comprises a CDR1 comprising an amino acid sequence having at least 90% identity, at least 95% identity, or 100% identity to any one of SEQ ID NOs:48, 56, 649, 685, 775 and 847; a CDR2 comprising an amino acid sequence having at least 90% identity, at least 95% identity, or 100% identity to any one of SEQ ID NOs:49, 57, 650, 686, 776 and 848; and a CDR3 comprising an amino acid sequence having at least 90% identity, at least 95% identity, or 100% identity to any one of SEQ ID NOs:50, 58, 651, 687, 777 and 849; and
[0492] wherein the VL1, VL2, VL3 or VL4 that specifically binds to an immune stimulating receptor comprises a CDR1 comprising an amino acid sequence having at least 90% identity, at least 95% identity, or 100% identity to any one of SEQ ID NOs:51, 59, 645, 681, 771 and 843; a CDR2 comprising an amino acid sequence having at least 90% identity, at least 95% identity, or 100% identity to any one of SEQ ID NOs:52, 60, 646, 682, 772 and 844; and a CDR3 comprising an amino acid sequence having at least 90% identity, at least 95% identity, or 100% identity to any one of SEQ ID NOs:53, 61, 647, 683, 773 and 845.
[0493] 62. The antigen binding polypeptide complex of clause 61, wherein the VH1, VH2, VH3 or VH4 that specifically binds to an immune stimulating receptor comprises a CDR1 comprising an amino acid sequence having at least 90% identity to SEQ ID NO:48; a CDR2 comprising an amino acid sequence having at least 90% identity to SEQ ID NO:49; and a CDR3 comprising an amino acid sequence having at least 90% identity to SEQ ID NO:50; and wherein the VL1, VL2, VL3 or VL4 that specifically binds to an immune stimulating receptor comprises a CDR1 comprising an amino acid sequence having at least at least 90% identity to SEQ ID NO:51; a CDR2 comprising an amino acid sequence having at least 90% identity to SEQ ID NO:52; and a CDR3 comprising an amino acid sequence having at least 90% identity to SEQ ID NO:53; optionally
[0494] wherein the VH1, VH2, VH3 or VH4 that specifically binds to an immune stimulating receptor comprises a CDR1 comprising the amino acid of SEQ ID NO:48; a CDR2 comprising the amino acid of SEQ ID NO:49; and a CDR3 comprising the amino acid of SEQ ID NO:50; and wherein the VL1, VL2, VL3 or VL4 that specifically binds to an immune stimulating receptor comprises a CDR1 comprising the amino acid of SEQ ID NO:51; a CDR2 comprising the amino acid of SEQ ID NO:52; and a CDR3 comprising the amino acid of SEQ ID NO:53.
[0495] 63. The antigen binding polypeptide complex of clause 61, wherein the VH1, VH2, VH3 or VH4 that specifically binds to an immune stimulating receptor comprises a CDR1 comprising an amino acid sequence having at least 90% identity to SEQ ID NO:56; a CDR2 comprising an amino acid sequence having at least 90% identity to SEQ ID NO:57; and a CDR3 comprising an amino acid sequence having at least 90% identity to SEQ ID NO:58; and wherein the VL1, VL2, VL3 or VL4 that specifically binds to an immune stimulating receptor comprises a CDR1 comprising an amino acid sequence having at least at least 90% identity to SEQ ID NO:59; a CDR2 comprising an amino acid sequence having at least 90% identity to SEQ ID NO:60; and a CDR3 comprising an amino acid sequence having at least 90% identity to SEQ ID NO:61; optionally
[0496] wherein the VH1, VH2, VH3 or VH4 that specifically binds to an immune stimulating receptor comprises a CDR1 comprising the amino acid of SEQ ID NO:56; a CDR2 comprising the amino acid of SEQ ID NO:57; and a CDR3 comprising the amino acid of SEQ ID NO:58; and wherein the VL1, VL2, VL3 or VL4 that specifically binds to an immune stimulating receptor comprises a CDR1 comprising the amino acid of SEQ ID NO:59; a CDR2 comprising the amino acid of SEQ ID NO:60; and a CDR3 comprising the amino acid of SEQ ID NO:61.
[0497] 64. The antigen binding polypeptide complex of any one of clauses 57 to 63, wherein the VH1, VH2, VH3 or VH4 that specifically binds to an immune stimulating receptor comprises an amino acid sequence having at least 80%, at least 85%, at least 90%, at least 95%, or 100% identity to any one of SEQ ID NOs:54, 62, 528, 648, 684, 774 and 846, and the VL1, VL2, VL3 or VL4 that specifically binds to an immune stimulating receptor comprises an amino acid sequence having at least 80%, at least 85%, at least 90%, at least 95%, or 100% identity to any one of SEQ ID NOs:55, 63, 527, 644, 680, 770 and 842.
[0498] 65. The antigen binding polypeptide complex of clause 64, wherein the VH1, VH2, VH3 or VH4 that specifically binds to an immune stimulating receptor comprises an amino acid sequence having at least 80% identity to SEQ ID NO:54, and the VL1, VL2, VL3 or VL4 that specifically binds to an immune stimulating receptor comprises an amino acid sequence having at least 80% identity to SEQ ID NO:55; optionally wherein the VH1, VH2, VH3 or VH4 that specifically binds to an immune stimulating receptor comprises the amino acid sequence of SEQ ID NO:54, and the VL1, VL2, VL3 or VL4 that specifically binds to an immune stimulating receptor comprising the amino acid of SEQ ID NO:55.
[0499] 66. The antigen binding polypeptide complex of clause 64, wherein the VH1, VH2, VH3 or VH4 that specifically binds to an immune stimulating receptor comprises an amino acid sequence having at least 80% identity to SEQ ID NO:62, and the VL1, VL2, VL3 or VL4 that specifically binds to an immune stimulating receptor comprises an amino acid sequence having at least 80% identity to SEQ ID NO:63; optionally wherein the VH1, VH2, VH3 or VH4 that specifically binds to an immune stimulating receptor comprises the amino acid sequence of SEQ ID NO:62, and the VL1, VL2, VL3 or VL4 that specifically binds to an immune stimulating receptor comprising the amino acid of SEQ ID NO:63.
[0500] 67. The antigen binding polypeptide complex of any one of clauses 1 to 66, wherein L5, L8, or L5 and L8 are cleavable linkers.
[0501] 68. The antigen binding polypeptide complex of clause 67, wherein VH3 and VL3 specifically bind to CD3.
[0502] 69. The antigen binding polypeptide complex of clause 67 or 68, wherein VH1 and VL1 and/or VH2 and VL2 specifically bind to a TAA; optionally wherein the TAA is selected from CD19 and CD20; or wherein the TAA is selected from cMet and Trop2.
[0503] 70. The antigen binding polypeptide complex of any one of any one of clauses 67 to 69, wherein VH1 and VL1 or VH2 and VL2 specifically bind to CD28.
[0504] 71. The antigen binding polypeptide complex of any one of clauses 1 to 70, wherein L4, L7, or L4 and L7 are cleavable linkers.
[0505] 72. The antigen binding polypeptide complex of clause 71, wherein VH3 and VL3 specifically bind to CD3.
[0506] 73. The antigen binding polypeptide complex of clause 71 or 72, wherein VH1 and VL1 and/or VH2 and VL2 specifically bind to a TAA; optionally wherein the TAA is selected from CD19 and CD20; or wherein the TAA is selected from cMet and Trop2.
[0507] 74. The antigen binding polypeptide complex of any one of clauses 71 to 73, wherein VH1 and VL1 or VH2 and VL2 specifically bind to CD28.
[0508] 75. The antigen binding polypeptide complex of any one of clauses 1 to 74, wherein L9, L12, or L9 and L12 are cleavable linkers.
[0509] 76. The antigen binding polypeptide complex of clause 75, wherein VH4 and VL4 specifically bind to CD3.
[0510] 77. The antigen binding polypeptide complex of clause 75 or clause 76, wherein one or more of VH1 and VL1, VH2 and VL2, and VH3 and VL3 specifically bind to a TAA.
[0511] 78. The antigen binding polypeptide complex of any one of clauses 75 to 77, wherein VH1 and VL1 specifically bind to a TAA, VH2 and VL2 specifically bind to a TAA, and VH3 and VL3 specifically bind to CD28.
[0512] 79. The antigen binding polypeptide complex of any one of clauses 75 to 77, wherein VH1 and VL1 specifically bind to CD28, VH2 and VL2 specifically bind to a TAA, and VH3 and VL3 specifically bind to a TAA.
[0513] 80. The antigen binding polypeptide complex of any one of clauses 75 to 77, wherein VH1 and VL1 specifically bind to cMet, VH2 and VL2 specifically bind to Trop2, and VH3 and VL3 specifically bind to CD28.
[0514] 81. The antigen binding polypeptide complex of any one of clauses 75 to 77, wherein VH1 and VL1 specifically bind to Trop2, VH2 and VL2 specifically bind to cMet, and VH3 and VL3 specifically bind to CD28.
[0515] 82. The antigen binding polypeptide complex of any one of clauses 75 to 77, wherein VH1 and VL1 specifically bind to cMet, VH2 and VL2 specifically bind to CD28, and VH3 and VL3 specifically bind to Trop2.
[0516] 83. The antigen binding polypeptide complex of any one of clauses 75 to 77, wherein VH1 and VL1 specifically bind to CD28, VH2 and VL2 specifically bind to cMet, and VH3 and VL3 specifically bind to Trop2.
[0517] 84. The antigen binding polypeptide complex of any one of clauses 75 to 77, wherein VH1 and VL1 specifically bind to Trop2, VH2 and VL2 specifically bind to CD28, and VH3 and VL3 specifically bind to cMet.
[0518] 85. The antigen binding polypeptide complex of any one of clauses 75 to 77, wherein VH1 and VL1 specifically bind to CD28, VH2 and VL2 specifically bind to Trop2, and VH3 and VL3 specifically bind to cMet.
[0519] 86. The antigen binding polypeptide complex of any one of clauses 75 to 77, wherein VH1 and VL1 specifically bind to CD19, VH2 and VL2 specifically bind to CD20, and VH3 and VL3 specifically bind to CD28.
[0520] 87. The antigen binding polypeptide complex of any one of clauses 75 to 77, wherein VH1 and VL1 specifically bind to CD20, VH2 and VL2 specifically bind to CD19, and VH3 and VL3 specifically bind to CD28.
[0521] 88. The antigen binding polypeptide complex of any one of clauses 75 to 77, wherein VH1 and VL1 specifically bind to CD19, VH2 and VL2 specifically bind to CD28, and VH3 and VL3 specifically bind to CD20.
[0522] 89. The antigen binding polypeptide complex of any one of clauses 75 to 77, wherein VH1 and VL1 specifically bind to CD20, VH2 and VL2 specifically bind to CD28, and VH3 and VL3 specifically bind to CD19.
[0523] 90. The antigen binding polypeptide complex of any one of clauses 75 to 77, wherein VH1 and VL1 specifically bind to CD28, VH2 and VL2 specifically bind to CD19, and VH3 and VL3 specifically bind to CD20.
[0524] 91. The antigen binding polypeptide complex of any one of clauses 75 to 77, wherein VH1 and VL1 specifically bind to CD28, VH2 and VL2 specifically bind to CD20, and VH3 and VL3 specifically bind to CD19.
[0525] 92. The antigen binding polypeptide complex of any one of clauses 1 to 91, wherein L1, L3, or L1 and L3 are cleavable linkers, or L5, L7, or L5 and L7 are cleavable linkers.
[0526] 93. The antigen binding polypeptide complex of any one of clauses 1 to 91, wherein L9, L11, or L9 and L11 are cleavable linkers, or L13, L15, or L13 and L15 are cleavable linkers.
[0527] 94. The antigen binding polypeptide complex of clause 92 or clause 93, wherein VH1 and VL1, VH2 and VL2, VH3 and VL3, or VH4 and VL4 specifically bind to CD3.
[0528] 95. The antigen binding polypeptide complex of any one of clauses 92 to 94, wherein one or more of VH1 and VL1, VH2 and VL2, VH3 and VL3, and VH4 and VL4 specifically bind to a TAA; optionally wherein the TAA is selected from CD19 and CD20; or wherein the TAA is selected from cMet and Trop2.
[0529] 96. The antigen binding polypeptide complex of any one of clauses 92 to 95, wherein VH1 and VL1, VH2 and VL2, VH3 and VL3, and/or VH4 and VL4 specifically bind to CD28.
[0530] 97. The antigen binding polypeptide complex of any one of clauses 1 to 96, wherein the antigen binding polypeptide complex is an antibody or antigen binding fragment thereof.
[0531] 98. The antigen binding polypeptide complex of any one of clauses 1 to 97, wherein the immunoglobulin hinge comprises an upper hinge region, a middle hinge region, a lower hinge region, or a combination thereof.
[0532] 99. The antigen binding polypeptide complex of any one of clauses 1 to 98, wherein the Fc region comprises at least one knob-into-hole modification.
[0533] 100. The antigen binding polypeptide complex of clause 99, wherein the antigen binding polypeptide complex is an IgG1 or IgG4 antibody and the knob-into-hole modification comprises:
[0534] (i) knob substitutions of S354C and T366W and hole substitutions of Y349C, T366S, L368A and Y407V;
[0535] (ii) hole substitutions of L234A, L235A and P329A;
[0536] (iii) hole substitutions of L234A and L235A;
[0537] (iv) hole substitutions of M428L and N433S;
[0538] (v) hole substitutions of M252Y, S254T and T256E; or
[0539] (vi) a combination thereof;
   based on the EU numbering scheme.
[0540] 101. An antibody or antigen binding fragment thereof comprising the antigen binding polypeptide complex of any one of clauses 1 to 100.
[0541] 102. A pharmaceutical composition comprising the antigen binding polypeptide complex of any one of clauses 1 to 100, or the antibody or antigen binding fragment thereof of clause 101, and a pharmaceutically acceptable carrier.
[0542] 103. A kit comprising an antigen binding polypeptide complex of any one of clauses 1 to 100, an antibody or antigen binding fragment thereof of clause 101, or the pharmaceutical composition of clause 102, and instructions for use.
[0543] 104. An antigen binding polypeptide complex of any one of clauses 1 to 100, the antibody or antigen binding fragment thereof of clause 101, or the pharmaceutical composition of clause 102 for use in treating cancer in a subject in need thereof.
[0544] 105. The antigen binding polypeptide complex, antibody or antigen binding fragment thereof or the pharmaceutical composition for use according to clause 104, wherein the cancer is breast cancer, lung cancer, gastric cancer, or prostate cancer, cervical cancer, urothelial cancer, or pancreatic cancer.
[0545] 106. The antigen binding polypeptide complex, antibody or antigen binding fragment thereof or the pharmaceutical composition for use according to clause 104, wherein the cancer is a hematological cancer.
[0546] 107. The antigen binding polypeptide complex, antibody or antigen binding fragment thereof or the pharmaceutical composition for use according to clause 104, wherein the cancer is a solid cancer.
[0547] 108. The antigen binding polypeptide complex, antibody or antigen binding fragment thereof or the pharmaceutical composition for use according to clause 106, wherein the hematological cancer is leukemia or lymphoma.
[0548] 109. The antigen binding polypeptide complex, antibody or antigen binding fragment thereof or the pharmaceutical composition for use according to clause 108, wherein the leukemia or lymphoma is B cell leukemia, B cell lymphoma, diffuse large B-cell lymphoma (DLBCL) Follicular lymphoma, Chronic lymphocytic leukemia (CLL)/small lymphocytic lymphoma (SLL), Mantle cell lymphoma (MCL), Burkitt lymphoma, Lymphoplasmacytic lymphoma (Waldenstrom macroglobulinemia), prolymphocytic leukemia (PLL) or hairy cell leukemia (HCL).

### EXAMPLES

[0549] The following examples are provided to further illustrate aspects of the disclosure, and are not meant to constrain the disclosure to any particular application or theory of operation. SEQ ID NOs:1-866 were obtained and/or prepared according to the processes described herein.

### Example 1

### Design of Masked Multispecific Molecules

[0550] Non-limiting examples of trispecific antibody configurations are shown in FIGS. 1A-1B. FIG. 1A illustrates configurations of masked trispecific T cell engagers. Fv1-Fv2 are against tumor associated antigens (TAAs) or immune costimulatory receptors. The third Fv targets CD3. In some embodiments, linkers between the heavy or light chains of Fv2 and αCD3 contain one or more protease recognition sites. In some embodiments, Fv1-Fv2 target human Trop2, cMet, and/or CD28. In some embodiments, Fv1 is in the form of a scFv. In some embodiments, Fv1 is in the form of a Fab. FIG. 1B illustrates a configuration of masked tetraspecific T cell engagers. Fv1-Fv3 are against tumor associated antigens (TAAs) or immune costimulatory receptors. The fourth Fv targets CD3. In some embodiments, linkers between Fv3 and αCD3 contain one or more protease recognition sites. In some embodiments, Fv1-Fv3 target human Trop2, cMet, and CD28.

[0551] Antibody heavy chain variable domain (VH) and light chain variable domain (VL) sequences targeting human CD3, CD28, Trop2, and cMet were selected from publicly available databases (e.g., GenBank) or patents to illustrate the feasibility of constructing various formats of trispecific antibodies. Linkers in various length and sequence connecting VH and VL regions in different orders and orientations were tested, with and without different motifs of the constant domains (e.g., CL, CH1, CH2, CH3). “Knob” and “hole” mutations were integrated into respective halves of the antibody Fc region when Fc heterodimerization was needed. Effector function or half-life extension mutations can also be incorporated into the Fc sequences when needed. Once the amino acid sequences for each trispecific antibody molecule were assembled, DNA encoding these sequences were codon optimized, synthesized (Cambridge Biologics, LLC, Brookline, MA), and cloned into a eukaryotic expression vector.

### Example 2

### Expression and Purification of Masked and Non-Masked Multispecific Molecules

[0552] Masked and non-masked antibodies were produced by transient transfection of expression plasmids into Expi293F cells at density of 2.5-3.0×10⁶ per ml using PEI (Polyscience). Plasmid DNA and PEI were diluted in OPTi-MEM (LifeTech) separately and mixed later. The plasmid/PEI mixture, at a ratio of 1:3 (w:w), was added to the cell culture 10 minutes after mixing. Valproic acid and sodium propionate were added to final concentrations of 0.5 mM and 5 mM, respectively, 16-20 hours post transfection. Supernatant was harvested 5 days post transfection, and filtered through a 0.45 μm filter. Multispecific antibodies were then purified first by affinity chromatography using Protein A resins in batch mode according to manufacture's standard procedures. After antibodies were eluted using IgG elusion buffer (Thermo Fischer Scientific) from protein A, they were dialyzed into 10 mM Histidine (pH6.0)+25 mM NaCl overnight. Antibodies were further purified by size exclusion chromatography using Hiload 16/600 Superdex 200 PG or Superdex 200 Increase 10/300 GL (Cytiva Lifesciences). Fractions with the correct elusion profile were collected and concentrated for further characterization.

### Example 3

### In Vitro Protease Treatment of Masked Multispecific Molecules

[0553] Purified masked multispecific molecules at 1 ug/ml were incubated with 0.2 pg/ml activated Matriptase (MTP) (R & D systems, Cat #3946-SEB) or 0.4 μg/ml MMP9 (R & D system, Cat #911_MP) at 37° C. for 4 hours. 2 pg of digested proteins were run on SDS-PAGE.

[0554] FIG. 2 shows SDS-PAGE results of in vitro cleavage of exemplary masked tetraspecific molecules as depicted. Molecules were treated with either MTP or MMP9 protease as specified. GS:non-cleavable linker sequences are on both light chain (LC) and heavy chain (HC). LC_mmp:MMP2 sensitive linker sequences are on LC, and non-cleavable linker sequences are on HC. HC_mtp:MTP sensitive linker sequences are on HC, and non-cleavable linker sequences are on LC.

### Example 4

### ELISA Binding Analysis of Masked and Non-Masked Multispecific Molecules

[0555] An ELISA binding assay was used to test binding of multispecific molecules to their target antigens. Target protein for each binding site of the multispecific molecules was coated in the wells of 96-well Immuno Plate (Thermo Fisher Scientific) overnight at 4° C. Coated plates were blocked using 5% skim milk+2% BSA in PBS+0.25% Tween for one hour at room temperature, then washed with PBS+0.25% Tween 20 for three times. Serial diluted multispecific molecules and control molecules were added to the plate and incubated at room temperature for 1 hour. Plates were washed three times with PBS+0.25% Tween 20, incubated with HPR conjugated detection antibody for one hour at room temperature, washed again, and then developed with Peroxidase Substrate (KPL, Gaithersburg, MD, USA). After the reaction was terminated by adding 100 μl of KPL TMB BlueSTOP solution, the plate was read at OD650 using a plate reader and data analyzed in GraphPad Prism.

[0556] FIG. 3 shows ELISA binding results of exemplary masked tetraspecific molecules as depicted in FIG. 2, or negative isotype (Control IgG1), with or without protease treatment. Molecules cleaved or not cleaved by MTP or MMP9 as specified were tested for binding affinity to Trop2 and cMet. Affinities to these two targets were not affected by protease treatment.

[0557] FIG. 4 shows ELISA binding results of exemplary masked tetraspecific molecules as depicted in FIG. 2, or negative isotype (Control IgG1), with or without protease treatment. Molecules cleaved or not cleaved by MTP or MMP9 as specified were tested for binding affinity to CD28. Affinities to these two targets were not affected by protease treatment.

[0558] FIG. 5 shows ELISA binding results of exemplary masked tetraspecific molecules as depicted in FIG. 2, or negative isotype (Control IgG1), with or without protease treatment. Molecules cleaved or not cleaved by MTP or MMP9 as specified were tested for binding affinity to CD3.

[0559] FIG. 7 shows ELISA binding results of exemplary non-masked tetraspecific molecules as depicted, or negative isotype (hIgG1LALPA) control, to their respective targets of hTrop2, hcMet, hCD28, and hCD3.

### Example 5

### T Cell Activation Assay

[0560] T cell activation by multispecific molecules was tested using an in vitro T cell activation assay. Purified human PBMCs (Blood Research Component, Brookline, MA, USA) were resuspended in culture medium (RPMI1640 with 10% FBS and supplemented with Penicillin Streptomycin)(Gibco) (2.5×10⁵ cells/ml). Serial diluted multispecific and control molecules were first coated onto 96-well flat-bottom culture plates by incubating for 2-4 hours in a 37° C. tissue culture incubator. PBMCs (200 μL) were then added to each well containing the molecules and incubated for 16-24 hours in a 37° C. tissue culture incubator. The cells were spun down, stained with florescent labeled antibodies for T cell activation marker CD69, and analyzed by an Attune flow cytometer (Thermo Fisher Scientific, USA). Data was analyzed using FlowJo software.

[0561] FIG. 8 shows CD69+ activation by exemplary non-masked tetraspecific molecules, or negative isotype (IgG1LALPA) control, of CD2+ T cells from PBMCs of two different donors.

### Example 6

### In Vitro Cytolytic Assay

[0562] Cytolysis of lymphoma tumor cells Z-138 by T cells mediated by trispecific antibodies was determined using an in vitro cytolytic assay. PBMCs were isolated from normal human donors by Ficoll separation. In vitro cytotoxicity assay was real-time monitored of cellular phenotypic changes by measurement of electrical impedance using the Agilent×CELLigence RTCA MP system. The system measures impedance using interdigitated microelectrodes integrated into the bottom of each well of the tissue culture E-Plates 96. Briefly, tumor cell HCC1954 were seeded into an E-plate 96 as target cells (T) at 20K/well culture at 37° C. for overnight, followed by the addition of human PBMC cells as immune effector cells (E) at 200K/well, in the presence of the 5-fold serially diluted multispecific antibody or human IgG1 isotype control. Cell impedance (measured as the cell index) was normalized when the effector cells were added and monitored continuously every 30 min for a duration of up to 160 hours. The cytotoxicity was calculated as Lysis %=100−(experimental normalized cell index/average of control antibody group normalized cell index at same concentration)×100.

[0563] FIG. 6 shows cytolysis of HCC1954 tumor cells by PBMCs (E:T:10:1) mediated by exemplary masked tetraspecific molecules as depicted in FIG. 2, or negative isotype (Control IgG1), from PBMCs of two donors (KP63250 and KP63251).

### Example 7

### ELISA Binding Results of Exemplary Non-Masked Tetraspecific Molecules to their Targets hTrop2, hcMet, hCD28, and hCD3

[0564] Non-masked tetraspecific molecules MX612 (peptide: SEQ ID NO:250 (DNA: SEQ ID NO: 251), peptide: SEQ ID NO:412 (DNA: SEQ ID NO:413)) and MX613 were prepared as described above with binding regions for human cMet (hcMet), human Trop2 (hTrop2), human CD3 (hCD3), and human CD28 (hCD28). Binding affinity was confirmed by ELISA. FIG. 9 shows ELISA binding results (OD650) of MX612 and MX613 to their targets hTrop2, hcMet, hCD28, and hCD3. Results from a control antibody (control IgG), which does not bind these targets, is also shown. These results show that MX612 and MX613 bind to hTrop2, hcMet, hCD28, and hCD3.

### Example 8

### Simultaneous Co-Binding of MX612 to its Targets hTrop2, hcMet, hCD28, and hCD3 Measured by Biolayer-Interferometry

[0565] Simultaneous co-binding of MX612 to its targets hTrop2, hcMet, hCD28, and hCD3 was measured by biolayer-interferometry. On the Octet R8 (Sartorius), each equilibrated HIS1K (his-tag capture) biosensor was dipped into buffer for 60 seconds, followed by loading with first ligand to near-saturation (1400 or 1200 seconds as indicated). Afterwards, sequential analysis steps were performed with analyte (ligand or multispecific test antibody) or buffer as indicated for time frame as indicated. Plate oscillation at 1000 RPM; 1× kinetic buffer (1×PBS pH 7.4; 0.1% BSA; 0.02% Tween-80); 24 degrees. For biolayer-interferometry, His-tagged recombinant Trop2, cMET, CD28, or CD3 (100 nM in solution) was loaded onto a solid support biosensor by His-tag capture. MX612 was present as a solution analyte (52 nM). Association and disassociation were evaluated for 300 seconds each. The binding reaction occurred in 1× kinetic buffer (1×PBS pH 7.4; 0.1% BSA; 0.2% Tween-80) at 24 degrees. Results are shown in FIG. 10.

### Example 9

### Simultaneous Co-Binding of MX446 to its Targets hTrop2, hcMet, hCD28, and hCD3 Measured by Biolayer-Interferometry

[0566] Simultaneous co-binding of MX446 (peptide: SEQ ID NO:206 (DNA: SEQ ID NO:207), peptide: SEQ ID NO:511 (DNA: SEQ ID NO:512)) to its targets hTrop2, hcMet, hCD28, and hCD3 was measured by biolayer-interferometry as explained above. Results are shown in FIG. 11.

### Example 10

### CD4+ and CD8+ T Cell Activation by Exemplary Non-Masked Tetraspecific Molecules

[0567] The ability of exemplary non-masked tetraspecific molecules to activate CD4+ and CD8+ T cells (CD69+) was tested. Human PBMCs (Blood Research Component, Brookline, MA, USA) were purified from healthy donors, resuspended in culture medium (RPMI1640 with 10% FBS and supplemented with Penicillin/Streptomycin)(Gibco), and seeded onto 96-well cell culture plates containing serially diluted multispecific test antibodies or human IgG1LALAPA isotype control. The plates were incubated for 16-24 hours in a 37° C. tissue culture incubator. The cells were then stained with fluorescently labeled antibodies (anti-CD2, anti-CD8, anti-CD4, anti-CD69, and fixable viability dye) and analyzed by flow cytometry (Thermo Fisher Scientific, USA) for measuring percentage of T cell activation marker CD69 among T cell subsets. Data were analyzed using FlowJo software.

[0568] Results from PBMCs from six different donors in the absence of target tumor cells and following treatment with 1 nM MX446 and MX612 are shown in FIG. 12. Results from a negative control (isotype IgG1LALPA; “−Ctl”) and positive control (CD3+CD28 mAbs; “+Ctl”) are also shown.

### Example 11

### In Vitro Cytokine Release by Exemplary Non-Masked Tetraspecific Molecules

[0569] The ability of exemplary non-masked tetraspecific molecules to initiate release of the cytokines IL-2, IFN-gamma, IL-6 and TNFalpha was tested. Cell culture supernatants were assayed for cytokines using the MILLIPLEX® MAP multiplex assay (Millipore Sigma) with adoption of the Drop Array system (Curiox Biosystems, Singapore). In brief, cell culture supernatants were collected 24 or 48 hours after co-incubation of human PBMC and test antibodies along with, or without, tumor target cells. Magnetic analyte bead mixture was then added to wells in the DropArray assay plate. Standards, quality controls, and diluted samples were then added to the plate; all standards and quality controls were tested in duplicate, with samples tested in multiple replicates. The plate was placed on a magnetic stand in a humidified chamber and shaken overnight at 4° C. The plate was washed with a DropArray LT210 washing station (Curiox Biosystems). Detection antibody and streptavidin-PE substrate were added to each well and incubated with shaking. The plate was washed before reading by Luminex MAGPIX instrument. Data were analyzed using EMD Millipore Milliplex Analyst software or Thermofisher Procartaplex Analysis Tool.

[0570] Results from PBMCs from six different donors in the absence of target tumor cells and following treatment with 1 nM MX446 and MX612 are shown in FIG. 13A-13B. Results from a negative control (isotype IgG1LALPA; “−Ctl”) and positive control (CD3+CD28 mAbs; “+Ctl”) are also shown.

### Example 12

### In Vitro Cytokine Release by Exemplary Non-Masked Tetraspecific Molecules

[0571] The ability of exemplary non-masked tetraspecific molecules to initiate release of the cytokines IL-2, IFN-gamma, IL-6 and TNFalpha was tested. Results from PBMCs from six different donors in the presence of HCC1954 tumor cells and following treatment with 62.5 pM MX446 and MX612 are shown in FIG. 14A-14B. Results from a negative control (isotype IgG1LALPA; “−Ctl”) are also shown.

### Example 13

### In Vitro Cytokine Release by Exemplary Non-Masked Tetraspecific Molecules

[0572] The ability of exemplary non-masked tetraspecific molecules to initiate release of the cytokines IL-2, IFN-gamma, IL-6 and TNFalpha was tested. Results from PBMCs from six different donors in the presence of BT20 tumor cells and following treatment with 62.5 pM MX446 and MX612 are shown in FIG. 15A-15B. Results from a negative control (isotype IgG1LALPA; “−Ctl”) are also shown.

### Example 14

### Cytolysis of Tumor Cell Lines Mediated by Exemplary Non-Masked Tetraspecific Molecules

[0573] Cytolysis of tumor cell lines by exemplary non-masked tetraspecific molecules or a negative control from PBMCs (E:T 5:1) was tested. The target tumor cells were labeled with the membrane dye PKH-26 (Sigma-Aldrich) and seeded into 96-well U bottom plate at 20K/well. The serially diluted test multispecific antibodies or human IgG1LALAPA isotype control were added with human PBMCs or enriched Pan-T cells as effector cells at an effector-to-target (E:T) ratio of 5:1 (E:T=3:1 using enriched Pan T cells). After culturing at 37° C. for 24 hours, the cells were staining with a LIVE/DEAD Fixable Dead Cell Stain Kit (Life Technologies) and measured by the number of live cells in the labeled target cell population by running the samples on Attune instrument (ThermoFisher) followed by analysis using the FlowJo software (Tree Star). The cytotoxicity was calculated as Lysis %=100−(experimental live target cell/average of control antibody group live target cell)*100.

[0574] HCC1954, BT-20, HCC1143 and HCC70 breast cancer cells, PC3 and DU145 prostate cancer cells, and Hs746T and N87 gastric cancer cells were used. Percent lysis of cells following treatment with MX446 and MX612, and EC50 values in pM are shown in FIG. 16A-16B. Results from a negative control (isotype IgG1LALAPA) are also shown. FIG. 17 summarizes cytolysis potencies of various tumor cell lines mediated by exemplary non-masked tetraspecific molecules, from PBMCs (E:T: 5:1) of six different donors.

### Example 15

### Binding of Exemplary Non-Masked Tetraspecific Molecules to hTrop2, hcMet, hCD28, and hCD3

[0575] Binding of exemplary non-masked tetraspecific molecules to their targets hTrop2, hcMet, hCD28, and hCD3 was measured by biolayer-interferometry. On the Octet R8 (Sartorius), recombinant his-tagged Trop2, cMet, CD3, CD28 or CD19 as indicated was loaded by his-tag capture onto HIS1K biosensors (100-300 nM ligand, 300 seconds, 1000 RPM). After baseline step (100 seconds, 1000 RPM), loaded onto HIS1K biosensors (Sartorius) (300 seconds). Following baseline step (100 seconds), association with analyte multispecific test antibody as indicated (52 nM; 300 seconds) and dissociation (300 seconds) was monitored. All steps in 1× kinetic buffer (1×PBS pH 7.4; 0.1% BSA; 0.02% Tween-80), at 24 degrees, and with 1000 RPM. Baseline was set by mean of last five seconds of baseline step and high-frequency noise was filtered by Savitsky-Golay filtering (Octet Analysis Studio, Sartorius).

[0576] Results are shown in FIG. 18A-18C for cells treated with MX974, MX975 and MX976, respectively. These results show that MX974, MX975 and MX976 bound to hTrop2, hcMet, hCD28, and hCD3.

### Example 16

### In Vitro Cytolysis of HCC1954 Tumor Cells Mediated by Exemplary Non-Masked Tetraspecific Molecules

[0577] In vitro cytolysis of HCC1954 tumor cells by exemplary non-masked tetraspecific molecules was measured. Cytolysis mediated by MX974, MX975 and MX976 or a negative control from PBMCs (E:T: 5:1) was measured from a representative donor after 48 and 72 hours of incubation at 37° C. Results are shown in FIG. 19 as percent lysis of cells with increasing concentration of antibody. Results from a negative control (hIgG1LALAPA) are also shown.

### Example 17

### CD4+ and CD8+ T Cell Activation (CD69+) by Exemplary Masked Tetraspecific Molecules

[0578] Activation of CD4+ and CD8+ T cells (CD69+) from PBMCs by exemplary masked tetraspecific molecules was tested. Results are shown in FIG. 20 as the percentage of CD69+ cells from six donors in the absence of target tumor cells, following treatment with MX444 (peptide: SEQ ID NO:204 (DNA: SEQ ID NO:205), peptide: SEQ ID NO:162 (DNA: SEQ ID NO: 163), peptide: SEQ ID NO:176 (DNA: SEQ ID NO:177)) or MX634 (peptide: SEQ ID NO:372 (DNA: SEQ ID NO:373), peptide: SEQ ID NO:426 (DNA: SEQ ID NO:427), peptide: SEQ ID NO:469 (DNA: SEQ ID NO:470)) at 1 nM. Results from a negative control (isotype IgG1LALPA; “−Ctl”) and a positive control (CD3+CD28 mAbs; “+Ctl”) are also shown.

### Example 18

### In Vitro Cytokine Release by Exemplary Masked Tetraspecific Molecules

[0579] The ability of exemplary non-masked tetraspecific molecules to initiate release of the cytokines IL-2, IFN-gamma, IL-6 and TNFalpha was tested. Results from PBMCs from six different donors in the absence of target tumor cells and following treatment with 1 nM MX444 and MX634 are shown in FIG. 21A-21B. Results from a negative control (isotype IgG1LALPA; “−Ctl”) and positive control (CD3+CD28 mAbs; “+Ctl”) are also shown.

### Example 19

### In Vitro Cytokine Release by Exemplary Masked Tetraspecific Molecules

[0580] The ability of exemplary non-masked tetraspecific molecules to initiate release of the cytokines IL-2, IFN-gamma, IL-6 and TNFalpha was tested. Results from PBMCs from six different donors in the absence of target tumor cells and following treatment with 1 nM MX444 and MX634 are shown in FIG. 22A-22B. Results from a negative control (isotype IgG1LALPA; “−Ctl”) and positive control (CD3+CD28 mAbs; “+Ctl”) are also shown.

### Example 20

### In Vitro Cytokine Release by Exemplary Masked Tetraspecific Molecules

[0581] The ability of exemplary non-masked tetraspecific molecules to initiate release of the cytokines IL-2, IFN-gamma, IL-6 and TNFalpha was tested. Results from PBMCs from six different donors in the presence of HCC1954 tumor cells and following treatment with 62.5 pM MX444 and MX634 are shown in FIG. 23A-23B. Results from a negative control (isotype IgG1LALPA; “−Ctl”) are also shown.

### Example 21

### In Vitro Cytokine Release by Exemplary Masked Tetraspecific Molecules

[0582] The ability of exemplary non-masked tetraspecific molecules to initiate release of the cytokines IL-2, IFN-gamma, IL-6 and TNFalpha was tested. Results from PBMCs from six different donors in the presence of BT20 tumor cells and following treatment with 62.5 pM MX444 and MX634 are shown in FIG. 24A-24B. Results from a negative control (isotype IgG1LALPA; “−Ctl”) are also shown. FIG. 25 summarizes cytolysis potencies of various tumor cell lines mediated by exemplary non-masked tetraspecific molecules, from PBMCs (E:T: 5:1) of six different donors.

### Example 22

### ELISA Binding Results of Exemplary Non-Masked Tetraspecific Molecules to hCD19, hCD28 and hCD3

[0583] The ability of exemplary non-masked tetraspecific molecules MX433, MX434, MX435 and MX436 to bind to their targets was tested by ELISA. The molecules tested are shown in FIG. 26, and binding results to hCD19, hCD28 and hCD3 are shown in FIG. 27. Results from a negative control (hIgG1LALPA) are also shown.

### Example 23

### ELISA Binding Results of Exemplary Non-Masked Tetraspecific Molecules to hCD19, hCD28 and hCD3

[0584] The ability of exemplary non-masked tetraspecific molecules MX647, MX648, MX685 and MX686 to bind to their targets was tested by ELISA. The molecules tested are shown in FIG. 28, and binding results to hCD19, hCD28 and hCD3 are shown in FIG. 29.

### Example 24

### Surface Staining of Exemplary Non-Masked Tetraspecific Molecules

[0585] Surface staining of exemplary non-masked tetraspecific molecules to hCD20-expressing Epi293 cells was performed. The results are shown in FIG. 30. The molecules tested were MX647 (peptide: SEQ ID NO:513 (DNA: SEQ ID NO:514), peptide: SEQ ID NO:563 (DNA: SEQ ID NO:564)), MX789, MX788, MX787, MX786, MX685 (peptide: SEQ ID NO:513 (DNA: SEQ ID NO:514), peptide: SEQ ID NO:591 (DNA: SEQ ID NO:592)), MX793, MX792, MX791 and MX790. Staining with a negative control (hIgG1LALPA) is also shown.

### Example 25

### T Cell Activation, In Vitro Cytolysis, and In Vitro Cytokine Release by Exemplary Non-Masked Tetraspecific Molecules

[0586] The ability of exemplary non-masked tetraspecific molecules to activate T cells (CD69+), induce in vitro cytolysis, and induce in vitro cytokine release was tested as described above. The molecules tested were MX647, MX648, MX685 (peptide: SEQ ID NO:513 (DNA: SEQ ID NO:514), peptide: SEQ ID NO:591 (DNA: SEQ ID NO:592)), MX786 and MX790 (FIG. 31).

[0587] For T cell activation, the percentage of CD69+ cells from PBMCs of a representative donor in the absence of tumor cells and following treatment with MX647, MX648, MX685, MX786 and MX790 are shown in FIG. 32. EC50 in pM and results from a negative control (hIgG1LALAPA) are also shown.

[0588] For in vitro cytolysis, cytolysis mediated by MX647, MX648, MX685, MX786 and MX790 or a negative control (hIgG1LALAPA) from PBMCs (E:T: 5:1) was measured from a representative donor. Results are shown in FIG. 33 as percent lysis with increasing concentration of antibody. EC50 in pM and Rmax values are also shown.

[0589] For in vitro cytokine release, IL-2, IFN-gamma, IL-6 and TNFalpha were tested. First, cytokine release from PBMCs from a representative donor in the absence of target tumor cells and following treatment with 8 pM or 40 pM MX647, MX648, MX685, MX786 and MX790 after incubation for 24 hours at 37 C was evaluated. Results are shown in FIG. 34. Results from a negative control (hIgG1LALPA) are also shown. Second, cytokine release from PBMCs from a representative donor in the presence of Z-138 tumor cells and following treatment with 8 pM or 40 pM MX647, MX648, MX685, MX786 and MX790 after incubation for 24 hours at 37 C was evaluated. Results are shown in FIG. 35. Results from a negative control (hIgG1LALAPA) are also shown.

### Example 26

### Surface Staining of Exemplary Trispecific Molecules

[0590] Exemplary trispecific molecules MX848, MX856 and MX857 were prepared as described above and shown in FIG. 36. Surface staining of the molecules to hCD20-expressing Epi293 cells was performed as described above. The results are shown in FIG. 36. Staining with a negative control (control) is also shown.

### Example 27

### In Vitro Cytolysis of Exemplary Trispecific Molecule

[0591] In vitro cytolysis of Z-138 tumor cells mediated by MX857 or a negative control (hIgG1LALAPA) from PBMCs from two representative donors (E:T: 3:1) was measured. Results are shown in FIG. 37 as percent lysis of cells with increasing concentration of antibody.

### Example 28

### Surface Staining of Exemplary Tetraspecific Molecules

[0592] Exemplary tetraspecific molecules MX846, MX854 and MX855 were prepared as described above and shown in FIG. 38. Surface staining of 12.5 nM of the molecules to hCD20-expressing Epi293 cells was performed as described above. The results are shown in FIG. 38. Staining with a negative control (control) is also shown.

### Example 29

### Surface Staining of Exemplary Tetraspecific Molecules

[0593] Exemplary tetraspecific molecules MX850, MX851, MX852 and MX853 were prepared as described above and shown in FIG. 39A-39B. Surface staining of 12.5 nM of the molecules to hCD20-expressing Epi293 cells was performed as described above. The results are shown in FIG. 39A-39B. Staining with a negative control (control) is also shown.

### Example 30

### In Vitro Cytolysis of Exemplary Tetraspecific Molecule

[0594] In vitro cytolysis of Z-138 tumor cells mediated by MX855 or a negative control (hIgG1LALAPA) from PBMCs from two representative donors (E:T: 3:1) was measured at 37 C after 40 hours. Results are shown in FIG. 40 as percent lysis of cells with increasing concentration of antibody.

### Example 31

### Binding of MX977 and MX978 to their Targets CD20, CD19, CD28 and CD3 as Measured by Biolayer-Interferometry

[0595] Exemplary tetraspecific molecules MX977 and MX978 were prepared as described above and shown in FIG. 41A-41B. Biolayer-interferometry was performed as described above. Results are shown in FIG. 41A-41B. These results show that MX977 and MX978 bound to their expected targets CD20, CD19, CD28 and CD3.

### Example 32

### Surface Staining of Exemplary Tetraspecific Molecules

[0596] Surface staining of 12.5 nM MX977 and MX978 to hCD20-expressing Epi293 cells was performed as described above. The results are shown in FIG. 42. Staining with a negative control (hIgGLALAPA) is also shown.

### Example 33

### In Vitro Cytolysis of Exemplary Tetraspecific Molecule

[0597] In vitro cytolysis of Toledo tumor cells mediated by MX977, MX978 or a negative control (hIgG1LALAPA) from PBMCs from a representative donor (E:T: 5:1) was measured at 37 C after 40 hours. Results are shown in FIG. 43 as percent lysis of cells with increasing concentration of antibody.

[0598] All publications, patents, patent applications and biological deposit mentioned in this application are herein incorporated in their entirety by reference into the specification, to the same extent as if each individual publication, patent, patent application or biological deposit was specifically and individually indicated to be incorporated herein by reference. In addition, citation or identification of any reference in this application shall not be construed as an admission that such reference is available as prior art to the present invention. To the extent that section headings are used, they should not be construed as necessarily limiting.

The application's sequence listing, which the Patent Office published only in electronic form, follows.

SEQUENCE LISTING (881 sequences)

SEQ ID NO: 1 - protein, 5 aa, synthetic construct
  source 1..5: note = Linker
GGSSG

SEQ ID NO: 2 - protein, 5 aa, synthetic construct
  source 1..5: note = Linker
GSSGS

SEQ ID NO: 3 - protein, 5 aa, synthetic construct
  source 1..5: note = Linker
GTVAA

SEQ ID NO: 4 - protein, 5 aa, synthetic construct
  source 1..5: note = Linker
ASGGS

SEQ ID NO: 5 - protein, 5 aa, synthetic construct
  source 1..5: note = Linker
ASTGG

SEQ ID NO: 6 - protein, 5 aa, synthetic construct
  source 1..5: note = Linker
GGSGS

SEQ ID NO: 7 - protein, 6 aa, synthetic construct
  source 1..6: note = Linker
ASGGSG

SEQ ID NO: 8 - protein, 7 aa, synthetic construct
  source 1..7: note = Linker
GGSGSSG

SEQ ID NO: 9 - protein, 10 aa, synthetic construct
  source 1..10: note = Linker
GGSGGSSGSS

SEQ ID NO: 10 - protein, 10 aa, synthetic construct
  source 1..10: note = Linker
SGGSGSSGGS

SEQ ID NO: 11 - protein, 17 aa, synthetic construct
  source 1..17: note = Linker
GGSGGSGSGGGSASGSG

SEQ ID NO: 12 - protein, 18 aa, synthetic construct
  source 1..18: note = Linker
GGSGGSGSGGGGSASGSG

SEQ ID NO: 13 - protein, 20 aa, synthetic construct
  source 1..20: note = Linker
GGGSSGGGGSGGSGSGGSGS

SEQ ID NO: 14 - protein, 20 aa, synthetic construct
  source 1..20: note = Linker
GGGGSGGSGSGGGGSASGSG

SEQ ID NO: 15 - protein, 20 aa, synthetic construct
  source 1..20: note = Linker
GGGSSGGSGSGGSGSGGSGS

SEQ ID NO: 16 - protein, 22 aa, synthetic construct
  source 1..22: note = Linker
SGGSSGGSGSGGSGSGGSGSSG

SEQ ID NO: 17 - protein, 22 aa, synthetic construct
  source 1..22: note = Linker
GSGSSGGGGSGGSGSGGSGSSG

SEQ ID NO: 18 - protein, 40 aa, synthetic construct
  source 1..40: note = Linker
GGGGSGSGGSGGGSSGGGGSGGGGSGGGGSGGGGSGGGGS

SEQ ID NO: 19 - protein, 40 aa, synthetic construct
  source 1..40: note = Linker
GGGGSGGGGSGGGGSGGGGSGGGGSGGGGSGGGGSGGGGS

SEQ ID NO: 20 - protein, 43 aa, synthetic construct
  source 1..43: note = Linker
GGGGSGSGGSGGGSSGGGGSGGGGSGGGGSGGGGSGGGGSSSS

SEQ ID NO: 21 - protein, 45 aa, synthetic construct
  source 1..45: note = Linker
GGGGSGSGGSGGGSSGGGGSGGGGSGGGGSGGGGSGGGGSSSSGS

SEQ ID NO: 22 - protein, 6 aa, synthetic construct
  source 1..6: note = Cleavable linker
GPAALV

SEQ ID NO: 23 - protein, 7 aa, synthetic construct
  source 1..7: note = Cleavable linker
GPLGLTG

SEQ ID NO: 24 - protein, 7 aa, synthetic construct
  source 1..7: note = Cleavable linker
GPSGLVG

SEQ ID NO: 25 - protein, 6 aa, synthetic construct
  source 1..6: note = Cleavable linker
GSGRKG

SEQ ID NO: 26 - protein, 7 aa, synthetic construct
  source 1..7: note = Cleavable linker
STRKAGG

SEQ ID NO: 27 - protein, 7 aa, synthetic construct
  source 1..7: note = Cleavable Linker
ASTRKAG

SEQ ID NO: 28 - protein, 8 aa, synthetic construct
  source 1..8: note = Cleavable linker
ASTRKAGG

SEQ ID NO: 29 - protein, 7 aa, synthetic construct
  source 1..7: note = Cleavable linker
GPAGLVG

SEQ ID NO: 30 - protein, 8 aa, synthetic construct
  source 1..8: note = Cleavable linker
GPAGLVSG

SEQ ID NO: 31 - protein, 8 aa, synthetic construct
  source 1..8: note = Cleavable linker
GLVGRKAG

SEQ ID NO: 32 - protein, 5 aa, synthetic construct
  source 1..5: note = hCD3 CDRH1
KAWMH

SEQ ID NO: 33 - protein, 19 aa, synthetic construct
  source 1..19: note = hCD3 CDRH2
QIKDKSNSYATYYADSVKG

SEQ ID NO: 34 - protein, 10 aa, synthetic construct
  source 1..10: note = hCD3 CDRH3
VYYALSPFDY

SEQ ID NO: 35 - protein, 16 aa, synthetic construct
  source 1..16: note = hCD3 CDRL1
KSSQSLVHNNANTYLS

SEQ ID NO: 36 - protein, 7 aa, synthetic construct
  source 1..7: note = hCD3 CDRL2
KVSNRFS

SEQ ID NO: 37 - protein, 9 aa, synthetic construct
  source 1..9: note = hCD3 CDRL3
GQGTQYPFT

SEQ ID NO: 38 - protein, 121 aa, synthetic construct
  source 1..121: note = hCD3 VH
QVQLVESGGGVVQPGRSLRLSCAASGFTFTKAWMHWVRQAPGKQLEWVAQIKDKSNSYATYYADSVKGRFTISRDDSKNTLYLQMNSLRAEDTAVYYCRGVYYALSPFDYWGQGTLVTVSS

SEQ ID NO: 39 - protein, 112 aa, synthetic construct
  source 1..112: note = hCD3 VL
DIVMTQTPLSLSVTPGQPASISCKSSQSLVHNNANTYLSWYLQKPGQSPQSLIYKVSNRFSGVPDRFSGSGSGTDFTLKISRVEAEDVGVYYCGQGTQYPFTFGSGTKVEIK

SEQ ID NO: 40 - protein, 5 aa, synthetic construct
  source 1..5: note = bCD3cs CDRH1
RYTMH

SEQ ID NO: 41 - protein, 17 aa, synthetic construct
  source 1..17: note = bCD3c462s CDRH2
YINPSRGYTNYNQKFKD

SEQ ID NO: 42 - protein, 10 aa, synthetic construct
  source 1..10: note = bCD3cs CDRH3
YYDDHYSLDY

SEQ ID NO: 43 - protein, 119 aa, synthetic construct
  source 1..119: note = bCD3cs VH
DIKLQQSGAELARPGASVKMSCKTSGYTFTRYTMHWVKQRPGQGLEWIGYINPSRGYTNYNQKFKDKATLTTDKSSSTAYMQLSSLTSEDSAVYYCARYYDDHYSLDYWGQGTTLTVSS

SEQ ID NO: 44 - protein, 10 aa, synthetic construct
  source 1..10: note = bCD3 CDRL1
RASSSVSYMN

SEQ ID NO: 45 - protein, 7 aa, synthetic construct
  source 1..7: note = bCD3 CDRL2
DTSKVAS

SEQ ID NO: 46 - protein, 9 aa, synthetic construct
  source 1..9: note = bCD3 CDRL3
QQWSSNPLT

SEQ ID NO: 47 - protein, 106 aa, synthetic construct
  source 1..106: note = bCD3 VL
DIQLTQSPAIMSASPGEKVTMTCRASSSVSYMNWYQQKSGTSPKRWIYDTSKVASGVPYRFSGSGSGTSYSLTISSMEAEDAATYYCQQWSSNPLTFGAGTKLELK

SEQ ID NO: 48 - protein, 9 aa, synthetic construct
  source 1..9: note = TgCD28cs CDRH1
GYTFTSYYI

SEQ ID NO: 49 - protein, 8 aa, synthetic construct
  source 1..8: note = TgCD28cs CDRH2
IYPGNVNT

SEQ ID NO: 50 - protein, 11 aa, synthetic construct
  source 1..11: note = TgCD28cs CDRH3
SHYGLDWNFDV

SEQ ID NO: 51 - protein, 9 aa, synthetic construct
  source 1..9: note = TgCD28cs CDRL1
HASQNIYVW

SEQ ID NO: 52 - protein, 7 aa, synthetic construct
  source 1..7: note = TgCD28cs CDRL2
KASNLHT

SEQ ID NO: 53 - protein, 9 aa, synthetic construct
  source 1..9: note = TgCD28cs CDRL3
QQGQTYPYT

SEQ ID NO: 54 - protein, 120 aa, synthetic construct
  source 1..120: note = TgCD28cs VH
QVQLVQSGAEVKKPGASVKVSCKASGYTFTSYYIHWVRQAPGQGLEWIGSIYPGNVNTNYNEKFKDRATLTVDTSISTAYMELSRLRSDDTAVYFCTRSHYGLDWNFDVWGQGTTVTVSS

SEQ ID NO: 55 - protein, 107 aa, synthetic construct
  source 1..107: note = TgCD28cs VL
DIQMTQSPSSLSASVGDRVTITCHASQNIYVWLNWYQQKPGKAPKLLIYKASNLHTGVPSRFSGSGSGTDFTLTISSLQPEDFATYYCQQGQTYPYTFGGGTKVEIK

SEQ ID NO: 56 - protein, 9 aa, synthetic construct
  source 1..9: note = TgCD28cs_ss CDRH1
GYTFTSYYI

SEQ ID NO: 57 - protein, 8 aa, synthetic construct
  source 1..8: note = TgCD28cs_ss CDRH2
IYPGNVNT

SEQ ID NO: 58 - protein, 11 aa, synthetic construct
  source 1..11: note = TgCD28cs_ss CDRH3
SHYGLDWNFDV

SEQ ID NO: 59 - protein, 9 aa, synthetic construct
  source 1..9: note = TgCD28cs_ss CDRL1
HASQNIYVW

SEQ ID NO: 60 - protein, 7 aa, synthetic construct
  source 1..7: note = TgCD28cs_ss CDRL2
KASNLHT

SEQ ID NO: 61 - protein, 9 aa, synthetic construct
  source 1..9: note = TgCD28cs_ss CDRL3
QQGQTYPYT

SEQ ID NO: 62 - protein, 120 aa, synthetic construct
  source 1..120: note = TgCD28cs_ss VH
QVQLVQSGAEVKKPGASVKVSCKASGYTFTSYYIHWVRQAPGQCLEWIGSIYPGNVNTNYNEKFKDRATLTVDTSISTAYMELSRLRSDDTAVYFCTRSHYGLDWNFDVWGQGTTVTVSS

SEQ ID NO: 63 - protein, 107 aa, synthetic construct
  source 1..107: note = TgCD28cs_ss VL
DIQMTQSPSSLSASVGDRVTITCHASQNIYVWLNWYQQKPGKAPKLLIYKASNLHTGVPSRFSGSGSGTDFTLTISSLQPEDFATYYCQQGQTYPYTFGCGTKVEIK

SEQ ID NO: 64 - protein, 5 aa, synthetic construct
  source 1..5: note = hCD38 CDRH1
SYAMH

SEQ ID NO: 65 - protein, 17 aa, synthetic construct
  source 1..17: note = hCD38 CDRH2
YIYPGQGGTNYNQKFQG

SEQ ID NO: 66 - protein, 11 aa, synthetic construct
  source 1..11: note = hCD38 CDRH3
TGGLRRAYFTY

SEQ ID NO: 67 - protein, 15 aa, synthetic construct
  source 1..15: note = hCD38 CDRL1
RASQSVSSYGQGFMH

SEQ ID NO: 68 - protein, 7 aa, synthetic construct
  source 1..7: note = hCD38 CDRL2
GASSRAT

SEQ ID NO: 69 - protein, 9 aa, synthetic construct
  source 1..9: note = hCD38 CDRL3
QQNKEDPWT

SEQ ID NO: 70 - protein, 120 aa, synthetic construct
  source 1..120: note = hCD38 VH
QVQLVQSGAEVVKPGASVKVSCKASGYTFTSYAMHWVKEAPGQRLEWIGYIYPGQGGTNYNQKFQGRATLTADTSASTAYMELSSLRSEDTAVYFCARTGGLRRAYFTYWGQGTLVTVSS

SEQ ID NO: 71 - protein, 111 aa, synthetic construct
  source 1..111: note = hCD38 VL
DIVLTQSPATLSLSPGERATISCRASQSVSSYGQGFMHWYQQKPGQPPRLLIYGASSRATGIPARFSGSGSGTDFTLTISPLEPEDFAVYYCQQNKEDPWTFGGGTKLEIK

SEQ ID NO: 72 - protein, 8 aa, synthetic construct
  source 1..8: note = cMet CDRH1
GYTFTSYW

SEQ ID NO: 73 - protein, 18 aa, synthetic construct
  source 1..18: note = cMet CDRH2
GMIDPSNSDTRFNPNFKD

SEQ ID NO: 74 - protein, 12 aa, synthetic construct
  source 1..12: note = cMet CDRH3
ATYKSYVSPLDY

SEQ ID NO: 75 - protein, 18 aa, synthetic construct
  source 1..18: note = cMet CDRL1
KSSQSLLYTSSQKNYLAW

SEQ ID NO: 76 - protein, 7 aa, synthetic construct
  source 1..7: note = cMet CDRL2
WASTRES

SEQ ID NO: 77 - protein, 9 aa, synthetic construct
  source 1..9: note = cMet CDRL3
QQYYAYPWT

SEQ ID NO: 78 - protein, 119 aa, synthetic construct
  source 1..119: note = cMet VH
QVQLVQSGAEVVKPGASVKLSCKASGYTFTSYWLHWVRQAPGQGLEWVGMIDPSNSDTRFNPNFKDRVTITADTSTSTAYMELSSLRSEDTAVYYCATYKSYVSPLDYWGQGTSVTVSS

SEQ ID NO: 79 - protein, 113 aa, synthetic construct
  source 1..113: note = cMet VL
DIVMTQSPDSLAVSLGERATINCKSSQSLLYTSSQKNYLAWYQQKPGQPPKLLIYWASTRESGVPDRFSGSGSGTDFTLTISSLQAEDVAVYYCQQYYAYPWTFGGGTKLEIK

SEQ ID NO: 80 - protein, 8 aa, synthetic construct
  source 1..8: note = Trop2_317 CDRH1
GFTFQNYA

SEQ ID NO: 81 - protein, 8 aa, synthetic construct
  source 1..8: note = Trop2_317 CDRH2
ISSDATYT

SEQ ID NO: 82 - protein, 11 aa, synthetic construct
  source 1..11: note = Trop2_317 CDRH3
HPPSYYYAFDY

SEQ ID NO: 83 - protein, 10 aa, synthetic construct
  source 1..10: note = Trop2_317 CDRL1
QSVDSYGNSF

SEQ ID NO: 84 - protein, 6 aa, synthetic construct
  source 1..6: note = Trop2_317 CDRL2
WASNRA

SEQ ID NO: 85 - protein, 9 aa, synthetic construct
  source 1..9: note = Trop2_317 CDRL3
QQNNEDLWT

SEQ ID NO: 86 - protein, 120 aa, synthetic construct
  source 1..120: note = Trop2_317 VH
EVQLVESGGGLVKPGGSLRLSCAASGFTFQNYAMSWVRQAPGKGLEWVSSISSDATYTYYADSVKGRFTISRDNAKNVLYLQMTSLRAEDTAVYYCARHPPSYYYAFDYWGQGTTLTVSS

SEQ ID NO: 87 - protein, 111 aa, synthetic construct
  source 1..111: note = Trop2_317 VL
EIVLTQSPATLSLSPGERATLSCRASQSVDSYGNSFLHWYQQKPGQAPRLLIYWASNRATGIPARFSGSGSGTDFTLTISSLEPEDFAVYYCQQNNEDLWTFGGGTKLEIK

SEQ ID NO: 88 - protein, 8 aa, synthetic construct
  source 1..8: note = Trop2_h20 CDRH1
GSSFTGYT

SEQ ID NO: 89 - protein, 7 aa, synthetic construct
  source 1..7: note = Trop2_h20 CDRH2
NPYQGDT

SEQ ID NO: 90 - protein, 11 aa, synthetic construct
  source 1..11: note = Trop2_h20 CDRH3
ARGAGLYYFDY

SEQ ID NO: 91 - protein, 6 aa, synthetic construct
  source 1..6: note = Trop2_h20 CDRL1
QDINKY

SEQ ID NO: 92 - skipped

SEQ ID NO: 93 - protein, 8 aa, synthetic construct
  source 1..8: note = Trop2_h20 CDRL3
LQYDDLFT

SEQ ID NO: 94 - protein, 118 aa, synthetic construct
  source 1..118: note = Trop2_h20 VH
QVQLVQSGAEVKKPGASVKVSCKASGSSFTGYTMNWVKQAPGQGLEWIGIINPYQGDTTYNQKFQGKVTITVDKSTSTVYMELSSLRSEDTAVYYCARGAGLYYFDYWGQGTTVTVSS

SEQ ID NO: 95 - protein, 106 aa, synthetic construct
  source 1..106: note = Trop2_h20 VL
DIQMTQSPSSLSASVGDRVTITCQASQDINKYLAWYQKKPGKAPKLLIHYTSNLQTGVPSRFSGSGSGTDFTFTISSLQPEDIATYYCLQYDDLFTFGQGTKLEIK

SEQ ID NO: 96 - protein, 8 aa, synthetic construct
  source 1..8: note = OKT3 CDRH1
GYTFTRYT

SEQ ID NO: 97 - protein, 8 aa, synthetic construct
  source 1..8: note = OKT3 CDRH2
INPSRGYT

SEQ ID NO: 98 - protein, 12 aa, synthetic construct
  source 1..12: note = OKT3 CDRH3
ARYYDDHYSLDY

SEQ ID NO: 99 - protein, 5 aa, synthetic construct
  source 1..5: note = OKT3 CDRL1
QSISY

SEQ ID NO: 100 - skipped

SEQ ID NO: 101 - protein, 9 aa, synthetic construct
  source 1..9: note = OKT3 CDRL3
QQWSSNPLT

SEQ ID NO: 102 - protein, 119 aa, synthetic construct
  source 1..119: note = OKT3 VH
QVQLVQSGAEVAKPGASVKVSCKASGYTFTRYTMHWVKQAPGQGLEWIGYINPSRGYTNYAQKFQGKATLTTDKSTSTAYMELSSLRSEDTAVYYCARYYDDHYSLDYWGQGTTLTVSS

SEQ ID NO: 103 - protein, 106 aa, synthetic construct
  source 1..106: note = OKT3 VL
DIQLTQSPSSLSASVGDRVTITCRASQSISYLNWYQQKPGKSPKRWIYDTSKLASGVPSRFSGSGSGTDYTLTISSMQPEDAATYYCQQWSSNPLTFGGGTKVEIK

SEQ ID NO: 104 - protein, 8 aa, synthetic construct
  source 1..8: note = hrCD20 CDRH1
GYTFTSYN

SEQ ID NO: 105 - protein, 8 aa, synthetic construct
  source 1..8: note = hrCD20 CDRH2
IYPGNGDT

SEQ ID NO: 106 - protein, 14 aa, synthetic construct
  source 1..14: note = hrCD20 CDRH3
ARSTYYGGDWYFNV

SEQ ID NO: 107 - protein, 6 aa, synthetic construct
  source 1..6: note = hrCD20 CDRL1
SSSVSY

SEQ ID NO: 108 - skipped

SEQ ID NO: 109 - protein, 9 aa, synthetic construct
  source 1..9: note = hrCD20 CDRL3
QQWTSNPPT

SEQ ID NO: 110 - protein, 121 aa, synthetic construct
  source 1..121: note = hrCD20 VH
QVQLVQPGAEVKKPGASVKMSCKASGYTFTSYNMHWVRQAPGRGLEWMGAIYPGNGDTSYNQKFQGRVTLTADKSTSTAYMELSSLESEDTAVYYCARSTYYGGDWYFNVWGAGTTVTVSA

SEQ ID NO: 111 - protein, 106 aa, synthetic construct
  source 1..106: note = hrCD20 VL
EIQLTQSPSSLSASVGDRVTITCRASSSVSYIHWFQQKPGSAPKSLIYATSNLASGVPSRFSGSGSGTDYTLTISSLQPEDFATYYCQQWTSNPPTFGGGTKLEIK

SEQ ID NO: 112 - protein, 8 aa, synthetic construct
  source 1..8: note = hrCD20_ss CDRH1
GYTFTSYN

SEQ ID NO: 113 - protein, 8 aa, synthetic construct
  source 1..8: note = hrCD20_ss CDRH2
IYPGSGDT

SEQ ID NO: 114 - protein, 14 aa, synthetic construct
  source 1..14: note = hrCD20_ss CDRH3
ARSTYYGGDWYFNV

SEQ ID NO: 115 - protein, 6 aa, synthetic construct
  source 1..6: note = hrCD20_ss CDRL1
SSSVSY

SEQ ID NO: 116 - skipped

SEQ ID NO: 117 - protein, 9 aa, synthetic construct
  source 1..9: note = hrCD20_ss CDRL3
QQWTSNPPT

SEQ ID NO: 118 - protein, 121 aa, synthetic construct
  source 1..121: note = hrCD20_ss VH
QVQLVQPGAEVKKPGASVKMSCKASGYTFTSYNMHWVRQAPGRCLEWMGAIYPGSGDTSYSQKFQGKVTLTADKSTSTAYMELSSLESEDTAVYYCARSTYYGGDWYFNVWGAGTTVTVSA

SEQ ID NO: 119 - protein, 106 aa, synthetic construct
  source 1..106: note = hrCD20_ss VL
EIQLTQSPSSLSASVGDRVTITCRASSSVSYIHWFQQKPGSAPKSLIYATSNLASGVPSRFSGSGSGTDYTLTISSLQPEDFATYYCQQWTSNPPTFGCGTKLEIK

SEQ ID NO: 120 - protein, 8 aa, synthetic construct
  source 1..8: note = hrCD19 CDRH1
GYAFSSYW

SEQ ID NO: 121 - protein, 8 aa, synthetic construct
  source 1..8: note = hrCD19 CDRH2
IWPGDSDT

SEQ ID NO: 122 - protein, 17 aa, synthetic construct
  source 1..17: note = hrCD19 CDRH3
ARRETTTVGRYYYAMDY

SEQ ID NO: 123 - protein, 10 aa, synthetic construct
  source 1..10: note = hrCD19 CDRL1
QSVDYSGDSY

SEQ ID NO: 124 - protein, 7 aa, synthetic construct
  source 1..7: note = hrCD19 CDRL2
DASNLVS

SEQ ID NO: 125 - protein, 9 aa, synthetic construct
  source 1..9: note = hrCD19 CDRL3
QQSTENPWT

SEQ ID NO: 126 - protein, 124 aa, synthetic construct
  source 1..124: note = hrCD19 VH
QVQLVQSGAEVKKPGSSVKVSCKASGYAFSSYWMNWVRQAPGQGLEWMGQIWPGDSDTNYAQKFQGRVTITADESTSTAYMELSSLRSEDTAVYYCARRETTTVGRYYYAMDYWGQGTTVTVSS

SEQ ID NO: 127 - protein, 111 aa, synthetic construct
  source 1..111: note = hrCD19 VL
DIQLTQSPSFLSASVGDRVTITCKASQSVDYSGDSYLNWYQQKPGKAPKLLIYDASNLVSGVPSRFSGSGSGTEFTLTISSLQPEDFATYYCQQSTENPWTFGGGTKLEIK

SEQ ID NO: 128 - protein, 8 aa, synthetic construct
  source 1..8: note = hrCD19_ss CDRH1
GYAFSSYW

SEQ ID NO: 129 - protein, 8 aa, synthetic construct
  source 1..8: note = hrCD19_ss CDRH2
IWPGDSDT

SEQ ID NO: 130 - protein, 17 aa, synthetic construct
  source 1..17: note = hrCD19_ss CDRH3
ARRETTTVGRYYYAMDY

SEQ ID NO: 131 - protein, 10 aa, synthetic construct
  source 1..10: note = hrCD19_ss CDRL1
QSVDYSGDSY

SEQ ID NO: 132 - protein, 7 aa, synthetic construct
  source 1..7: note = hrCD19_ss CDRL2
DASNLVS

SEQ ID NO: 133 - protein, 9 aa, synthetic construct
  source 1..9: note = hrCD19_ss CDRL3
QQSTENPWT

SEQ ID NO: 134 - protein, 124 aa, synthetic construct
  source 1..124: note = hrCD19_ss VH
QVQLVQSGAEVKKPGSSVKVSCKASGYAFSSYWMNWVRQAPGQCLEWMGQIWPGDSDTNYAQKFQGRVTITADESTSTAYMELSSLRSEDTAVYYCARRETTTVGRYYYAMDYWGQGTTVTVSS

SEQ ID NO: 135 - protein, 111 aa, synthetic construct
  source 1..111: note = hrCD19_ss VL
DIQLTQSPSFLSASVGDRVTITCKASQSVDYSGDSYLNWYQQKPGKAPKLLIYDASNLVSGVPSRFSGSGSGTEFTLTISSLQPEDFATYYCQQSTENPWTFGCGTKLEIK

SEQ ID NO: 136 - protein, 578 aa, synthetic construct
  source 1..578: note = ahCD38GS1ahCD3H_hIgG1
QVQLVQSGAEVVKPGASVKVSCKASGYTFTSYAMHWVKEAPGQRLEWIGYIYPGQGGTNYNQKFQGRATLTADTSASTAYMELSSLRSEDTAVYFCARTGGLRRAYFTYWGQGTLVTVSSGGSGSSGQVQLVESGGGVVQPGRSLRLSCAASGFTFTKAWMHWVRQAPGKQLEWVAQIKDKSNSYATYYADSVKGRFTISRDDSKNTLYLQMNSLRAEDTAVYYCRGVYYALSPFDYWGQGTLVTVSSASTKGPSVFPLAPSSKSTSGGTAALGCLVKDYFPEPVTVSWNSGALTSGVHTFPAVLQSSGLYSLSSVVTVPSSSLGTQTYICNVNHKPSNTKVDKKVEPKSCDKTHTCPPCPAPELLGGPSVFLFPPKPKDTLMISRTPEVTCVVVDVSHEDPEVKFNWYVDGVEVHNAKTKPREEQYNSTYRVVSVLTVLHQDWLNGKEYKCKVSNKALPAPIEKTISKAKGQPREPQVYTLPPSRDELTKNQVSLTCLVKGFYPSDIAVEWESNGQPENNYKTTPPVLDSDGSFFLYSKLTVDKSRWQQGNVFSCSVMHEALHNHYTQKSLSLSPGK

SEQ ID NO: 137 - DNA, 1734 bp, synthetic construct
  source 1..1734: mol_type = other DNA; note = ahCD38GS1ahCD3H_hIgG1
caggttcagctggttcagtctggcgccgaggttgtgaaacctggcgcctccgtgaaggtgtcctgtaaagccagcggctacacctttaccagctacgccatgcactgggtcaaagaggcccctggccaacggcttgagtggatcggctatatctacccaggccaaggcggcaccaactacaaccagaagttccagggcagagccacactgaccgccgatacaagcgccagcacagcctacatggaactgagcagcctgagaagcgaggataccgccgtgtacttctgcgccagaacaggcggactgcggagagcctactttacctattggggccagggcaccctggtcaccgtttcttctggcggctccggatctagcggccaggtgcagcttgttgaatctggcggaggtgttgtgcagcccggcagaagtctgagactgtcttgtgccgcctccggcttcaccttcacaaaggcctggatgcactgggttcgccaggctccaggcaaacagctggaatgggttgcccagatcaaggacaagagcaacagctacgccacctattacgccgacagcgtgaagggcagattcaccatcagccgggacgacagcaagaacaccctgtacctgcagatgaacagcctgagagccgaggatacagccgtctactattgccggggagtgtactacgctctgagcccctttgattactggggacagggcaccctggtcaccgtgtcctctgcttcgaccaagggccccagcgtgttccctctggcccctagcagcaagagcacatctggcggaacagccgccctgggctgcctcgtgaaggactactttcccgagcccgtgaccgtgtcctggaattctggcgccctgaccagcggcgtgcacacctttccagctgtgctgcagtccagcggcctgtacagcctgagcagcgtcgtgacagtgcccagcagctctctgggcacccagacctacatctgcaacgtgaaccacaagcccagcaacaccaaggtggacaagaaggtggaacccaagagctgcgacaagacccacacctgtcccccttgtcctgcccccgaactgctgggaggcccttccgtgttcctgttccccccaaagcccaaggacaccctgatgatcagccggacccccgaagtgacctgcgtggtggtggatgtgtcccacgaggaccctgaagtgaagttcaattggtacgtggacggcgtggaagtgcacaacgccaagaccaagccaagagaggaacagtacaacagcacctaccgggtggtgtccgtgctgaccgtgctgcaccaggactggctgaacggcaaagagtacaagtgcaaggtgtccaacaaggccctgcctgcccccatcgagaaaaccatcagcaaggccaagggccagccccgcgaaccccaggtgtacacactgcccccaagcagggacgagctgaccaagaaccaggtgtccctgacctgtctcgtgaaaggcttctacccctccgatatcgccgtggaatgggagagcaacggccagcccgagaacaactacaagaccaccccccctgtgctggacagcgacggctcattcttcctgtactccaagctgacagtggacaagtcccggtggcagcagggcaacgtgttcagctgctccgtgatgcacgaggccctgcacaaccactacacccagaagtccctgagcctgagccccggcaag

SEQ ID NO: 138 - protein, 337 aa, synthetic construct
  source 1..337: note = ahCD38GS1ahCD3L
DIVLTQSPATLSLSPGERATISCRASQSVSSYGQGFMHWYQQKPGQPPRLLIYGASSRATGIPARFSGSGSGTDFTLTISPLEPEDFAVYYCQQNKEDPWTFGGGTKLEIKGGSGSSGDIVMTQTPLSLSVTPGQPASISCKSSQSLVHNNANTYLSWYLQKPGQSPQSLIYKVSNRFSGVPDRFSGSGSGTDFTLKISRVEAEDVGVYYCGQGTQYPFTFGSGTKVEIKRTVAAPSVFIFPPSDEQLKSGTASVVCLLNNFYPREAKVQWKVDNALQSGNSQESVTEQDSKDSTYSLSSTLTLSKADYEKHKVYACEVTHQGLSSPVTKSFNRGEC

SEQ ID NO: 139 - DNA, 1011 bp, synthetic construct
  source 1..1011: mol_type = other DNA; note = ahCD38GS1ahCD3L
gacatcgtgctgacacagtctcccgccacactgtcactgtctccaggcgagagagccaccatcagctgtagagccagccagagcgtgtcctcttacggccagggcttcatgcactggtatcagcagaagcctggccagcctcctcggctgttgatctatggcgctagcagcagagccacaggcatccctgccagattttctggcagcggctctggcaccgacttcaccctgacaatcagccctctggaacccgaggacttcgccgtgtactactgccagcagaacaaagaggacccctggacctttggcggaggcaccaagctggaaatcaagggcggctctggctctagcggcgacatcgtgatgacccaaacacctctgagcctgagcgtgacacctggacagcctgccagcatcagctgcaagtctagccagagcctggtgcacaacaacgccaacacctacctgtcctggtatctccagaaacctggccagtctcctcagagcctcatctataaggtgtccaacagattcagcggcgtgccagacaggtttagcggctctggatctggcacagatttcacactgaagatcagccgcgtggaagccgaggatgtgggcgtgtactattgcggccagggaacacagtaccctttcacctttggaagcggcacaaaggtcgagatcaaacgtacggtggccgctcccagcgtgttcatcttcccacctagcgacgagcagctgaagtccggcacagcctctgtcgtgtgcctgctgaacaacttctacccccgcgaggccaaagtgcagtggaaggtggacaacgccctgcagagcggcaacagccaggaaagcgtgaccgagcaggacagcaaggactccacctacagcctgagcagcaccctgacactgagcaaggccgactacgagaagcacaaggtgtacgcctgcgaagtgacccaccagggcctgtctagccccgtgaccaagagcttcaaccggggcgagtgt

SEQ ID NO: 140 - protein, 577 aa, synthetic construct
  source 1..577: note = ahCD38Cl1ahCD3H_hIgG1
QVQLVQSGAEVVKPGASVKVSCKASGYTFTSYAMHWVKEAPGQRLEWIGYIYPGQGGTNYNQKFQGRATLTADTSASTAYMELSSLRSEDTAVYFCARTGGLRRAYFTYWGQGTLVTVSSGPAALVQVQLVESGGGVVQPGRSLRLSCAASGFTFTKAWMHWVRQAPGKQLEWVAQIKDKSNSYATYYADSVKGRFTISRDDSKNTLYLQMNSLRAEDTAVYYCRGVYYALSPFDYWGQGTLVTVSSASTKGPSVFPLAPSSKSTSGGTAALGCLVKDYFPEPVTVSWNSGALTSGVHTFPAVLQSSGLYSLSSVVTVPSSSLGTQTYICNVNHKPSNTKVDKKVEPKSCDKTHTCPPCPAPELLGGPSVFLFPPKPKDTLMISRTPEVTCVVVDVSHEDPEVKFNWYVDGVEVHNAKTKPREEQYNSTYRVVSVLTVLHQDWLNGKEYKCKVSNKALPAPIEKTISKAKGQPREPQVYTLPPSRDELTKNQVSLTCLVKGFYPSDIAVEWESNGQPENNYKTTPPVLDSDGSFFLYSKLTVDKSRWQQGNVFSCSVMHEALHNHYTQKSLSLSPGK

SEQ ID NO: 141 - DNA, 1728 bp, synthetic construct
  source 1..1728: mol_type = other DNA; note = ahCD38Cl1ahCD3H_hIgG1
caggttcagctggttcagtctggcgccgaggttgtgaaacctggcgcctccgtgaaggtgtcctgtaaagccagcggctacacctttaccagctacgccatgcactgggtcaaagaggcccctggccaacggcttgagtggatcggctatatctacccaggccaaggcggcaccaactacaaccagaagttccagggcagagccacactgaccgccgatacaagcgccagcacagcctacatggaactgagcagcctgagaagcgaggataccgccgtgtacttctgcgccagaacaggcggactgcggagagcctactttacctattggggccagggcaccctggtcaccgtttcttctggacctgctgcactggtgcaggtgcagcttgttgaatctggcggaggtgttgtgcagcccggcagaagtctgagactgtcttgtgccgcctccggcttcaccttcacaaaggcctggatgcactgggttcgccaggctccaggcaaacagctggaatgggttgcccagatcaaggacaagagcaacagctacgccacctattacgccgacagcgtgaagggcagattcaccatcagccgggacgacagcaagaacaccctgtacctgcagatgaacagcctgagagccgaggatacagccgtctactattgccggggagtgtactacgctctgagcccctttgattactggggacagggcaccctggtcaccgtgtcctctgcttcgaccaagggccccagcgtgttccctctggcccctagcagcaagagcacatctggcggaacagccgccctgggctgcctcgtgaaggactactttcccgagcccgtgaccgtgtcctggaattctggcgccctgaccagcggcgtgcacacctttccagctgtgctgcagtccagcggcctgtacagcctgagcagcgtcgtgacagtgcccagcagctctctgggcacccagacctacatctgcaacgtgaaccacaagcccagcaacaccaaggtggacaagaaggtggaacccaagagctgcgacaagacccacacctgtcccccttgtcctgcccccgaactgctgggaggcccttccgtgttcctgttccccccaaagcccaaggacaccctgatgatcagccggacccccgaagtgacctgcgtggtggtggatgtgtcccacgaggaccctgaagtgaagttcaattggtacgtggacggcgtggaagtgcacaacgccaagaccaagccaagagaggaacagtacaacagcacctaccgggtggtgtccgtgctgaccgtgctgcaccaggactggctgaacggcaaagagtacaagtgcaaggtgtccaacaaggccctgcctgcccccatcgagaaaaccatcagcaaggccaagggccagccccgcgaaccccaggtgtacacactgcccccaagcagggacgagctgaccaagaaccaggtgtccctgacctgtctcgtgaaaggcttctacccctccgatatcgccgtggaatgggagagcaacggccagcccgagaacaactacaagaccaccccccctgtgctggacagcgacggctcattcttcctgtactccaagctgacagtggacaagtcccggtggcagcagggcaacgtgttcagctgctccgtgatgcacgaggccctgcacaaccactacacccagaagtccctgagcctgagccccggc

SEQ ID NO: 142 - protein, 336 aa, synthetic construct
  source 1..336: note = ahCD38Cl1ahCD3L
DIVLTQSPATLSLSPGERATISCRASQSVSSYGQGFMHWYQQKPGQPPRLLIYGASSRATGIPARFSGSGSGTDFTLTISPLEPEDFAVYYCQQNKEDPWTFGGGTKLEIKGPAALVDIVMTQTPLSLSVTPGQPASISCKSSQSLVHNNANTYLSWYLQKPGQSPQSLIYKVSNRFSGVPDRFSGSGSGTDFTLKISRVEAEDVGVYYCGQGTQYPFTFGSGTKVEIKRTVAAPSVFIFPPSDEQLKSGTASVVCLLNNFYPREAKVQWKVDNALQSGNSQESVTEQDSKDSTYSLSSTLTLSKADYEKHKVYACEVTHQGLSSPVTKSFNRGEC

SEQ ID NO: 143 - DNA, 1008 bp, synthetic construct
  source 1..1008: mol_type = other DNA; note = ahCD38Cl1ahCD3L
gacatcgtgctgacacagtctcccgccacactgtcactgtctccaggcgagagagccaccatcagctgtagagccagccagagcgtgtcctcttacggccagggcttcatgcactggtatcagcagaagcctggccagcctcctcggctgttgatctatggcgctagcagcagagccacaggcatccctgccagattttctggcagcggctctggcaccgacttcaccctgacaatcagccctctggaacccgaggacttcgccgtgtactactgccagcagaacaaagaggacccctggacctttggcggaggcaccaagctggaaatcaagggacctgctgcactggtggacatcgtgatgacccaaacacctctgagcctgagcgtgacacctggacagcctgccagcatcagctgcaagtctagccagagcctggtgcacaacaacgccaacacctacctgtcctggtatctccagaaacctggccagtctcctcagagcctcatctataaggtgtccaacagattcagcggcgtgccagacaggtttagcggctctggatctggcacagatttcacactgaagatcagccgcgtggaagccgaggatgtgggcgtgtactattgcggccagggaacacagtaccctttcacctttggaagcggcacaaaggtcgagatcaaacgtacggtggccgctcccagcgtgttcatcttcccacctagcgacgagcagctgaagtccggcacagcctctgtcgtgtgcctgctgaacaacttctacccccgcgaggccaaagtgcagtggaaggtggacaacgccctgcagagcggcaacagccaggaaagcgtgaccgagcaggacagcaaggactccacctacagcctgagcagcaccctgacactgagcaaggccgactacgagaagcacaaggtgtacgcctgcgaagtgacccaccagggcctgtctagccccgtgaccaagagcttcaaccggggcgagtgt

SEQ ID NO: 144 - protein, 577 aa, synthetic construct
  source 1..577: note = ahCD38Cl2ahCD3H_hIgG1
QVQLVQSGAEVVKPGASVKVSCKASGYTFTSYAMHWVKEAPGQRLEWIGYIYPGQGGTNYNQKFQGRATLTADTSASTAYMELSSLRSEDTAVYFCARTGGLRRAYFTYWGQGTLVTVSSGPLGLTGQVQLVESGGGVVQPGRSLRLSCAASGFTFTKAWMHWVRQAPGKQLEWVAQIKDKSNSYATYYADSVKGRFTISRDDSKNTLYLQMNSLRAEDTAVYYCRGVYYALSPFDYWGQGTLVTVSSASTKGPSVFPLAPSSKSTSGGTAALGCLVKDYFPEPVTVSWNSGALTSGVHTFPAVLQSSGLYSLSSVVTVPSSSLGTQTYICNVNHKPSNTKVDKKVEPKSCDKTHTCPPCPAPELLGGPSVFLFPPKPKDTLMISRTPEVTCVVVDVSHEDPEVKFNWYVDGVEVHNAKTKPREEQYNSTYRVVSVLTVLHQDWLNGKEYKCKVSNKALPAPIEKTISKAKGQPREPQVYTLPPSRDELTKNQVSLTCLVKGFYPSDIAVEWESNGQPENNYKTTPPVLDSDGSFFLYSKLTVDKSRWQQGNVFSCSVMHEALHNHYTQKSLSLSPG

SEQ ID NO: 145 - DNA, 1731 bp, synthetic construct
  source 1..1731: mol_type = other DNA; note = ahCD38Cl2ahCD3H_hIgG1
caggttcagctggttcagtctggcgccgaggttgtgaaacctggcgcctccgtgaaggtgtcctgtaaagccagcggctacacctttaccagctacgccatgcactgggtcaaagaggcccctggccaacggcttgagtggatcggctatatctacccaggccaaggcggcaccaactacaaccagaagttccagggcagagccacactgaccgccgatacaagcgccagcacagcctacatggaactgagcagcctgagaagcgaggataccgccgtgtacttctgcgccagaacaggcggactgcggagagcctactttacctattggggccagggcaccctggtcaccgtttcttctggacccctgggcctcaccggccaggtgcagcttgttgaatctggcggaggtgttgtgcagcccggcagaagtctgagactgtcttgtgccgcctccggcttcaccttcacaaaggcctggatgcactgggttcgccaggctccaggcaaacagctggaatgggttgcccagatcaaggacaagagcaacagctacgccacctattacgccgacagcgtgaagggcagattcaccatcagccgggacgacagcaagaacaccctgtacctgcagatgaacagcctgagagccgaggatacagccgtctactattgccggggagtgtactacgctctgagcccctttgattactggggacagggcaccctggtcaccgtgtcctctgcttcgaccaagggccccagcgtgttccctctggcccctagcagcaagagcacatctggcggaacagccgccctgggctgcctcgtgaaggactactttcccgagcccgtgaccgtgtcctggaattctggcgccctgaccagcggcgtgcacacctttccagctgtgctgcagtccagcggcctgtacagcctgagcagcgtcgtgacagtgcccagcagctctctgggcacccagacctacatctgcaacgtgaaccacaagcccagcaacaccaaggtggacaagaaggtggaacccaagagctgcgacaagacccacacctgtcccccttgtcctgcccccgaactgctgggaggcccttccgtgttcctgttccccccaaagcccaaggacaccctgatgatcagccggacccccgaagtgacctgcgtggtggtggatgtgtcccacgaggaccctgaagtgaagttcaattggtacgtggacggcgtggaagtgcacaacgccaagaccaagccaagagaggaacagtacaacagcacctaccgggtggtgtccgtgctgaccgtgctgcaccaggactggctgaacggcaaagagtacaagtgcaaggtgtccaacaaggccctgcctgcccccatcgagaaaaccatcagcaaggccaagggccagccccgcgaaccccaggtgtacacactgcccccaagcagggacgagctgaccaagaaccaggtgtccctgacctgtctcgtgaaaggcttctacccctccgatatcgccgtggaatgggagagcaacggccagcccgagaacaactacaagaccaccccccctgtgctggacagcgacggctcattcttcctgtactccaagctgacagtggacaagtcccggtggcagcagggcaacgtgttcagctgctccgtgatgcacgaggccctgcacaaccactacacccagaagtccctgagcctgagccccggc

SEQ ID NO: 146 - protein, 337 aa, synthetic construct
  source 1..337: note = ahCD38Cl2ahCD3L
DIVLTQSPATLSLSPGERATISCRASQSVSSYGQGFMHWYQQKPGQPPRLLIYGASSRATGIPARFSGSGSGTDFTLTISPLEPEDFAVYYCQQNKEDPWTFGGGTKLEIKGPLGLTGDIVMTQTPLSLSVTPGQPASISCKSSQSLVHNNANTYLSWYLQKPGQSPQSLIYKVSNRFSGVPDRFSGSGSGTDFTLKISRVEAEDVGVYYCGQGTQYPFTFGSGTKVEIKRTVAAPSVFIFPPSDEQLKSGTASVVCLLNNFYPREAKVQWKVDNALQSGNSQESVTEQDSKDSTYSLSSTLTLSKADYEKHKVYACEVTHQGLSSPVTKSFNRGEC

SEQ ID NO: 147 - DNA, 1011 bp, synthetic construct
  source 1..1011: mol_type = other DNA; note = ahCD38Cl2ahCD3L
gacatcgtgctgacacagtctcccgccacactgtcactgtctccaggcgagagagccaccatcagctgtagagccagccagagcgtgtcctcttacggccagggcttcatgcactggtatcagcagaagcctggccagcctcctcggctgttgatctatggcgctagcagcagagccacaggcatccctgccagattttctggcagcggctctggcaccgacttcaccctgacaatcagccctctggaacccgaggacttcgccgtgtactactgccagcagaacaaagaggacccctggacctttggcggaggcaccaagctggaaatcaagggacccctgggcctcaccggcgacatcgtgatgacccaaacacctctgagcctgagcgtgacacctggacagcctgccagcatcagctgcaagtctagccagagcctggtgcacaacaacgccaacacctacctgtcctggtatctccagaaacctggccagtctcctcagagcctcatctataaggtgtccaacagattcagcggcgtgccagacaggtttagcggctctggatctggcacagatttcacactgaagatcagccgcgtggaagccgaggatgtgggcgtgtactattgcggccagggaacacagtaccctttcacctttggaagcggcacaaaggtcgagatcaaacgtacggtggccgctcccagcgtgttcatcttcccacctagcgacgagcagctgaagtccggcacagcctctgtcgtgtgcctgctgaacaacttctacccccgcgaggccaaagtgcagtggaaggtggacaacgccctgcagagcggcaacagccaggaaagcgtgaccgagcaggacagcaaggactccacctacagcctgagcagcaccctgacactgagcaaggccgactacgagaagcacaaggtgtacgcctgcgaagtgacccaccagggcctgtctagccccgtgaccaagagcttcaaccggggcgagtgt

SEQ ID NO: 148 - protein, 577 aa, synthetic construct
  source 1..577: note = ahCD38Cl3ahCD3H_hIgG1
QVQLVQSGAEVVKPGASVKVSCKASGYTFTSYAMHWVKEAPGQRLEWIGYIYPGQGGTNYNQKFQGRATLTADTSASTAYMELSSLRSEDTAVYFCARTGGLRRAYFTYWGQGTLVTVSSGPSGLVGQVQLVESGGGVVQPGRSLRLSCAASGFTFTKAWMHWVRQAPGKQLEWVAQIKDKSNSYATYYADSVKGRFTISRDDSKNTLYLQMNSLRAEDTAVYYCRGVYYALSPFDYWGQGTLVTVSSASTKGPSVFPLAPSSKSTSGGTAALGCLVKDYFPEPVTVSWNSGALTSGVHTFPAVLQSSGLYSLSSVVTVPSSSLGTQTYICNVNHKPSNTKVDKKVEPKSCDKTHTCPPCPAPELLGGPSVFLFPPKPKDTLMISRTPEVTCVVVDVSHEDPEVKFNWYVDGVEVHNAKTKPREEQYNSTYRVVSVLTVLHQDWLNGKEYKCKVSNKALPAPIEKTISKAKGQPREPQVYTLPPSRDELTKNQVSLTCLVKGFYPSDIAVEWESNGQPENNYKTTPPVLDSDGSFFLYSKLTVDKSRWQQGNVFSCSVMHEALHNHYTQKSLSLSPG

SEQ ID NO: 149 - DNA, 1731 bp, synthetic construct
  source 1..1731: mol_type = other DNA; note = ahCD38Cl3ahCD3H_hIgG1
caggttcagctggttcagtctggcgccgaggttgtgaaacctggcgcctccgtgaaggtgtcctgtaaagccagcggctacacctttaccagctacgccatgcactgggtcaaagaggcccctggccaacggcttgagtggatcggctatatctacccaggccaaggcggcaccaactacaaccagaagttccagggcagagccacactgaccgccgatacaagcgccagcacagcctacatggaactgagcagcctgagaagcgaggataccgccgtgtacttctgcgccagaacaggcggactgcggagagcctactttacctattggggccagggcaccctggtcaccgtttcttctggaccttccggacttgtcggacaggtgcagcttgttgaatctggcggaggtgttgtgcagcccggcagaagtctgagactgtcttgtgccgcctccggcttcaccttcacaaaggcctggatgcactgggttcgccaggctccaggcaaacagctggaatgggttgcccagatcaaggacaagagcaacagctacgccacctattacgccgacagcgtgaagggcagattcaccatcagccgggacgacagcaagaacaccctgtacctgcagatgaacagcctgagagccgaggatacagccgtctactattgccggggagtgtactacgctctgagcccctttgattactggggacagggcaccctggtcaccgtgtcctctgcttcgaccaagggccccagcgtgttccctctggcccctagcagcaagagcacatctggcggaacagccgccctgggctgcctcgtgaaggactactttcccgagcccgtgaccgtgtcctggaattctggcgccctgaccagcggcgtgcacacctttccagctgtgctgcagtccagcggcctgtacagcctgagcagcgtcgtgacagtgcccagcagctctctgggcacccagacctacatctgcaacgtgaaccacaagcccagcaacaccaaggtggacaagaaggtggaacccaagagctgcgacaagacccacacctgtcccccttgtcctgcccccgaactgctgggaggcccttccgtgttcctgttccccccaaagcccaaggacaccctgatgatcagccggacccccgaagtgacctgcgtggtggtggatgtgtcccacgaggaccctgaagtgaagttcaattggtacgtggacggcgtggaagtgcacaacgccaagaccaagccaagagaggaacagtacaacagcacctaccgggtggtgtccgtgctgaccgtgctgcaccaggactggctgaacggcaaagagtacaagtgcaaggtgtccaacaaggccctgcctgcccccatcgagaaaaccatcagcaaggccaagggccagccccgcgaaccccaggtgtacacactgcccccaagcagggacgagctgaccaagaaccaggtgtccctgacctgtctcgtgaaaggcttctacccctccgatatcgccgtggaatgggagagcaacggccagcccgagaacaactacaagaccaccccccctgtgctggacagcgacggctcattcttcctgtactccaagctgacagtggacaagtcccggtggcagcagggcaacgtgttcagctgctccgtgatgcacgaggccctgcacaaccactacacccagaagtccctgagcctgagccccggc

SEQ ID NO: 150 - protein, 337 aa, synthetic construct
  source 1..337: note = ahCD38Cl3ahCD3L
DIVLTQSPATLSLSPGERATISCRASQSVSSYGQGFMHWYQQKPGQPPRLLIYGASSRATGIPARFSGSGSGTDFTLTISPLEPEDFAVYYCQQNKEDPWTFGGGTKLEIKGPSGLVGDIVMTQTPLSLSVTPGQPASISCKSSQSLVHNNANTYLSWYLQKPGQSPQSLIYKVSNRFSGVPDRFSGSGSGTDFTLKISRVEAEDVGVYYCGQGTQYPFTFGSGTKVEIKRTVAAPSVFIFPPSDEQLKSGTASVVCLLNNFYPREAKVQWKVDNALQSGNSQESVTEQDSKDSTYSLSSTLTLSKADYEKHKVYACEVTHQGLSSPVTKSFNRGEC

SEQ ID NO: 151 - DNA, 1011 bp, synthetic construct
  source 1..1011: mol_type = other DNA; note = ahCD38Cl3ahCD3L
gacatcgtgctgacacagtctcccgccacactgtcactgtctccaggcgagagagccaccatcagctgtagagccagccagagcgtgtcctcttacggccagggcttcatgcactggtatcagcagaagcctggccagcctcctcggctgttgatctatggcgctagcagcagagccacaggcatccctgccagattttctggcagcggctctggcaccgacttcaccctgacaatcagccctctggaacccgaggacttcgccgtgtactactgccagcagaacaaagaggacccctggacctttggcggaggcaccaagctggaaatcaagggaccttccggacttgtcggagacatcgtgatgacccaaacacctctgagcctgagcgtgacacctggacagcctgccagcatcagctgcaagtctagccagagcctggtgcacaacaacgccaacacctacctgtcctggtatctccagaaacctggccagtctcctcagagcctcatctataaggtgtccaacagattcagcggcgtgccagacaggtttagcggctctggatctggcacagatttcacactgaagatcagccgcgtggaagccgaggatgtgggcgtgtactattgcggccagggaacacagtaccctttcacctttggaagcggcacaaaggtcgagatcaaacgtacggtggccgctcccagcgtgttcatcttcccacctagcgacgagcagctgaagtccggcacagcctctgtcgtgtgcctgctgaacaacttctacccccgcgaggccaaagtgcagtggaaggtggacaacgccctgcagagcggcaacagccaggaaagcgtgaccgagcaggacagcaaggactccacctacagcctgagcagcaccctgacactgagcaaggccgactacgagaagcacaaggtgtacgcctgcgaagtgacccaccagggcctgtctagccccgtgaccaagagcttcaaccggggcgagtgt

SEQ ID NO: 152 - protein, 576 aa, synthetic construct
  source 1..576: note = ahCD38Cl4ahCD3H_hIgG1
QVQLVQSGAEVVKPGASVKVSCKASGYTFTSYAMHWVKEAPGQRLEWIGYIYPGQGGTNYNQKFQGRATLTADTSASTAYMELSSLRSEDTAVYFCARTGGLRRAYFTYWGQGTLVTVSSGSGRKGQVQLVESGGGVVQPGRSLRLSCAASGFTFTKAWMHWVRQAPGKQLEWVAQIKDKSNSYATYYADSVKGRFTISRDDSKNTLYLQMNSLRAEDTAVYYCRGVYYALSPFDYWGQGTLVTVSSASTKGPSVFPLAPSSKSTSGGTAALGCLVKDYFPEPVTVSWNSGALTSGVHTFPAVLQSSGLYSLSSVVTVPSSSLGTQTYICNVNHKPSNTKVDKKVEPKSCDKTHTCPPCPAPELLGGPSVFLFPPKPKDTLMISRTPEVTCVVVDVSHEDPEVKFNWYVDGVEVHNAKTKPREEQYNSTYRVVSVLTVLHQDWLNGKEYKCKVSNKALPAPIEKTISKAKGQPREPQVYTLPPSRDELTKNQVSLTCLVKGFYPSDIAVEWESNGQPENNYKTTPPVLDSDGSFFLYSKLTVDKSRWQQGNVFSCSVMHEALHNHYTQKSLSLSPG

SEQ ID NO: 153 - DNA, 1728 bp, synthetic construct
  source 1..1728: mol_type = other DNA; note = ahCD38Cl4ahCD3H_hIgG1
caggttcagctggttcagtctggcgccgaggttgtgaaacctggcgcctccgtgaaggtgtcctgtaaagccagcggctacacctttaccagctacgccatgcactgggtcaaagaggcccctggccaacggcttgagtggatcggctatatctacccaggccaaggcggcaccaactacaaccagaagttccagggcagagccacactgaccgccgatacaagcgccagcacagcctacatggaactgagcagcctgagaagcgaggataccgccgtgtacttctgcgccagaacaggcggactgcggagagcctactttacctattggggccagggcaccctggtcaccgtttcttctggctccggaagaaagggacaggtgcagcttgttgaatctggcggaggtgttgtgcagcccggcagaagtctgagactgtcttgtgccgcctccggcttcaccttcacaaaggcctggatgcactgggttcgccaggctccaggcaaacagctggaatgggttgcccagatcaaggacaagagcaacagctacgccacctattacgccgacagcgtgaagggcagattcaccatcagccgggacgacagcaagaacaccctgtacctgcagatgaacagcctgagagccgaggatacagccgtctactattgccggggagtgtactacgctctgagcccctttgattactggggacagggcaccctggtcaccgtgtcctctgcttcgaccaagggccccagcgtgttccctctggcccctagcagcaagagcacatctggcggaacagccgccctgggctgcctcgtgaaggactactttcccgagcccgtgaccgtgtcctggaattctggcgccctgaccagcggcgtgcacacctttccagctgtgctgcagtccagcggcctgtacagcctgagcagcgtcgtgacagtgcccagcagctctctgggcacccagacctacatctgcaacgtgaaccacaagcccagcaacaccaaggtggacaagaaggtggaacccaagagctgcgacaagacccacacctgtcccccttgtcctgcccccgaactgctgggaggcccttccgtgttcctgttccccccaaagcccaaggacaccctgatgatcagccggacccccgaagtgacctgcgtggtggtggatgtgtcccacgaggaccctgaagtgaagttcaattggtacgtggacggcgtggaagtgcacaacgccaagaccaagccaagagaggaacagtacaacagcacctaccgggtggtgtccgtgctgaccgtgctgcaccaggactggctgaacggcaaagagtacaagtgcaaggtgtccaacaaggccctgcctgcccccatcgagaaaaccatcagcaaggccaagggccagccccgcgaaccccaggtgtacacactgcccccaagcagggacgagctgaccaagaaccaggtgtccctgacctgtctcgtgaaaggcttctacccctccgatatcgccgtggaatgggagagcaacggccagcccgagaacaactacaagaccaccccccctgtgctggacagcgacggctcattcttcctgtactccaagctgacagtggacaagtcccggtggcagcagggcaacgtgttcagctgctccgtgatgcacgaggccctgcacaaccactacacccagaagtccctgagcctgagccccggc

SEQ ID NO: 154 - protein, 336 aa, synthetic construct
  source 1..336: note = ahCD38Cl4ahCD3L
DIVLTQSPATLSLSPGERATISCRASQSVSSYGQGFMHWYQQKPGQPPRLLIYGASSRATGIPARFSGSGSGTDFTLTISPLEPEDFAVYYCQQNKEDPWTFGGGTKLEIKGSGRKGDIVMTQTPLSLSVTPGQPASISCKSSQSLVHNNANTYLSWYLQKPGQSPQSLIYKVSNRFSGVPDRFSGSGSGTDFTLKISRVEAEDVGVYYCGQGTQYPFTFGSGTKVEIKRTVAAPSVFIFPPSDEQLKSGTASVVCLLNNFYPREAKVQWKVDNALQSGNSQESVTEQDSKDSTYSLSSTLTLSKADYEKHKVYACEVTHQGLSSPVTKSFNRGEC

SEQ ID NO: 155 - DNA, 1008 bp, synthetic construct
  source 1..1008: mol_type = other DNA; note = ahCD38Cl4ahCD3L
gacatcgtgctgacacagtctcccgccacactgtcactgtctccaggcgagagagccaccatcagctgtagagccagccagagcgtgtcctcttacggccagggcttcatgcactggtatcagcagaagcctggccagcctcctcggctgttgatctatggcgctagcagcagagccacaggcatccctgccagattttctggcagcggctctggcaccgacttcaccctgacaatcagccctctggaacccgaggacttcgccgtgtactactgccagcagaacaaagaggacccctggacctttggcggaggcaccaagctggaaatcaagggctccggaagaaagggagacatcgtgatgacccaaacacctctgagcctgagcgtgacacctggacagcctgccagcatcagctgcaagtctagccagagcctggtgcacaacaacgccaacacctacctgtcctggtatctccagaaacctggccagtctcctcagagcctcatctataaggtgtccaacagattcagcggcgtgccagacaggtttagcggctctggatctggcacagatttcacactgaagatcagccgcgtggaagccgaggatgtgggcgtgtactattgcggccagggaacacagtaccctttcacctttggaagcggcacaaaggtcgagatcaaacgtacggtggccgctcccagcgtgttcatcttcccacctagcgacgagcagctgaagtccggcacagcctctgtcgtgtgcctgctgaacaacttctacccccgcgaggccaaagtgcagtggaaggtggacaacgccctgcagagcggcaacagccaggaaagcgtgaccgagcaggacagcaaggactccacctacagcctgagcagcaccctgacactgagcaaggccgactacgagaagcacaaggtgtacgcctgcgaagtgacccaccagggcctgtctagccccgtgaccaagagcttcaaccggggcgagtgt

SEQ ID NO: 156 - protein, 578 aa, synthetic construct
  source 1..578: note = ahCD38Cl5ahCD3H_hIgG1
QVQLVQSGAEVVKPGASVKVSCKASGYTFTSYAMHWVKEAPGQRLEWIGYIYPGQGGTNYNQKFQGRATLTADTSASTAYMELSSLRSEDTAVYFCARTGGLRRAYFTYWGQGTLVTVSSASTRKAGGQVQLVESGGGVVQPGRSLRLSCAASGFTFTKAWMHWVRQAPGKQLEWVAQIKDKSNSYATYYADSVKGRFTISRDDSKNTLYLQMNSLRAEDTAVYYCRGVYYALSPFDYWGQGTLVTVSSASTKGPSVFPLAPSSKSTSGGTAALGCLVKDYFPEPVTVSWNSGALTSGVHTFPAVLQSSGLYSLSSVVTVPSSSLGTQTYICNVNHKPSNTKVDKKVEPKSCDKTHTCPPCPAPELLGGPSVFLFPPKPKDTLMISRTPEVTCVVVDVSHEDPEVKFNWYVDGVEVHNAKTKPREEQYNSTYRVVSVLTVLHQDWLNGKEYKCKVSNKALPAPIEKTISKAKGQPREPQVYTLPPSRDELTKNQVSLTCLVKGFYPSDIAVEWESNGQPENNYKTTPPVLDSDGSFFLYSKLTVDKSRWQQGNVFSCSVMHEALHNHYTQKSLSLSPG

SEQ ID NO: 157 - DNA, 1734 bp, synthetic construct
  source 1..1734: mol_type = other DNA; note = ahCD38Cl5ahCD3H_hIgG1
caggttcagctggttcagtctggcgccgaggttgtgaaacctggcgcctccgtgaaggtgtcctgtaaagccagcggctacacctttaccagctacgccatgcactgggtcaaagaggcccctggccaacggcttgagtggatcggctatatctacccaggccaaggcggcaccaactacaaccagaagttccagggcagagccacactgaccgccgatacaagcgccagcacagcctacatggaactgagcagcctgagaagcgaggataccgccgtgtacttctgcgccagaacaggcggactgcggagagcctactttacctattggggccagggcaccctggtcaccgtttcttctgccagcacacggaaggctggcggacaggtgcagcttgttgaatctggcggaggtgttgtgcagcccggcagaagtctgagactgtcttgtgccgcctccggcttcaccttcacaaaggcctggatgcactgggttcgccaggctccaggcaaacagctggaatgggttgcccagatcaaggacaagagcaacagctacgccacctattacgccgacagcgtgaagggcagattcaccatcagccgggacgacagcaagaacaccctgtacctgcagatgaacagcctgagagccgaggatacagccgtctactattgccggggagtgtactacgctctgagcccctttgattactggggacagggcaccctggtcaccgtgtcctctgcttcgaccaagggccccagcgtgttccctctggcccctagcagcaagagcacatctggcggaacagccgccctgggctgcctcgtgaaggactactttcccgagcccgtgaccgtgtcctggaattctggcgccctgaccagcggcgtgcacacctttccagctgtgctgcagtccagcggcctgtacagcctgagcagcgtcgtgacagtgcccagcagctctctgggcacccagacctacatctgcaacgtgaaccacaagcccagcaacaccaaggtggacaagaaggtggaacccaagagctgcgacaagacccacacctgtcccccttgtcctgcccccgaactgctgggaggcccttccgtgttcctgttccccccaaagcccaaggacaccctgatgatcagccggacccccgaagtgacctgcgtggtggtggatgtgtcccacgaggaccctgaagtgaagttcaattggtacgtggacggcgtggaagtgcacaacgccaagaccaagccaagagaggaacagtacaacagcacctaccgggtggtgtccgtgctgaccgtgctgcaccaggactggctgaacggcaaagagtacaagtgcaaggtgtccaacaaggccctgcctgcccccatcgagaaaaccatcagcaaggccaagggccagccccgcgaaccccaggtgtacacactgcccccaagcagggacgagctgaccaagaaccaggtgtccctgacctgtctcgtgaaaggcttctacccctccgatatcgccgtggaatgggagagcaacggccagcccgagaacaactacaagaccaccccccctgtgctggacagcgacggctcattcttcctgtactccaagctgacagtggacaagtcccggtggcagcagggcaacgtgttcagctgctccgtgatgcacgaggccctgcacaaccactacacccagaagtccctgagcctgagccccggc

SEQ ID NO: 158 - protein, 338 aa, synthetic construct
  source 1..338: note = ahCD38Cl5ahCD3L
DIVLTQSPATLSLSPGERATISCRASQSVSSYGQGFMHWYQQKPGQPPRLLIYGASSRATGIPARFSGSGSGTDFTLTISPLEPEDFAVYYCQQNKEDPWTFGGGTKLEIKASTRKAGGDIVMTQTPLSLSVTPGQPASISCKSSQSLVHNNANTYLSWYLQKPGQSPQSLIYKVSNRFSGVPDRFSGSGSGTDFTLKISRVEAEDVGVYYCGQGTQYPFTFGSGTKVEIKRTVAAPSVFIFPPSDEQLKSGTASVVCLLNNFYPREAKVQWKVDNALQSGNSQESVTEQDSKDSTYSLSSTLTLSKADYEKHKVYACEVTHQGLSSPVTKSFNRGEC

SEQ ID NO: 159 - DNA, 1014 bp, synthetic construct
  source 1..1014: mol_type = other DNA; note = ahCD38Cl5ahCD3L
gacatcgtgctgacacagtctcccgccacactgtcactgtctccaggcgagagagccaccatcagctgtagagccagccagagcgtgtcctcttacggccagggcttcatgcactggtatcagcagaagcctggccagcctcctcggctgttgatctatggcgctagcagcagagccacaggcatccctgccagattttctggcagcggctctggcaccgacttcaccctgacaatcagccctctggaacccgaggacttcgccgtgtactactgccagcagaacaaagaggacccctggacctttggcggaggcaccaagctggaaatcaaggccagcacacggaaggctggcggagacatcgtgatgacccaaacacctctgagcctgagcgtgacacctggacagcctgccagcatcagctgcaagtctagccagagcctggtgcacaacaacgccaacacctacctgtcctggtatctccagaaacctggccagtctcctcagagcctcatctataaggtgtccaacagattcagcggcgtgccagacaggtttagcggctctggatctggcacagatttcacactgaagatcagccgcgtggaagccgaggatgtgggcgtgtactattgcggccagggaacacagtaccctttcacctttggaagcggcacaaaggtcgagatcaaacgtacggtggccgctcccagcgtgttcatcttcccacctagcgacgagcagctgaagtccggcacagcctctgtcgtgtgcctgctgaacaacttctacccccgcgaggccaaagtgcagtggaaggtggacaacgccctgcagagcggcaacagccaggaaagcgtgaccgagcaggacagcaaggactccacctacagcctgagcagcaccctgacactgagcaaggccgactacgagaagcacaaggtgtacgcctgcgaagtgacccaccagggcctgtctagccccgtgaccaagagcttcaaccggggcgagtgt

SEQ ID NO: 160 - protein, 573 aa, synthetic construct
  source 1..573: note = TgCD28csGSbCD3csHholeLALAPA
QVQLVQSGAEVKKPGASVKVSCKASGYTFTSYYIHWVRQAPGQGLEWIGSIYPGNVNTNYNEKFKDRATLTVDTSISTAYMELSRLRSDDTAVYFCTRSHYGLDWNFDVWGQGTTVTVSSGGSGSDIKLQQSGAELARPGASVKMSCKTSGYTFTRYTMHWVKQRPGQGLEWIGYINPSRGYTNYNQKFKDKATLTTDKSSSTAYMQLSSLTSEDSAVYYCARYYDDHYSLDYWGQGTTLTVSSASTKGPSVFPLAPSSKSTSGGTAALGCLVKDYFPEPVTVSWNSGALTSGVHTFPAVLQSSGLYSLSSVVTVPSSSLGTQTYICNVNHKPSNTKVDKKVEPKSCDKTHTCPPCPAPEAAGGPSVFLFPPKPKDTLMISRTPEVTCVVVDVSHEDPEVKFNWYVDGVEVHNAKTKPREEQYNSTYRVVSVLTVLHQDWLNGKEYKCKVSNKALAAPIEKTISKAKGQPREPQVCTLPPSRDELTKNQVSLSCAVKGFYPSDIAVEWESNGQPENNYKTTPPVLDSDGSFFLVSKLTVDKSRWQQGNVFSCSVMHEALHNHYTQKSLSLSPG

SEQ ID NO: 161 - DNA, 1719 bp, synthetic construct
  source 1..1719: mol_type = other DNA; note = TgCD28csGSbCD3csHholeLALAPA
caggttcagctggttcagtctggcgccgaagtgaagaaacctggcgcctctgtgaaggtgtcctgcaaggccagcggctacacctttaccagctactacatccactgggtccgacaggcccctggacaaggactggaatggatcggcagcatctaccccggcaacgtgaacaccaactacaacgagaagttcaaggaccgggccacactgaccgtggacacctctatcagcaccgcctacatggaactgagccggctgagatccgatgataccgccgtgtacttctgcaccagaagccactacggcctggactggaacttcgatgtgtggggccagggcaccaccgtgacagtttcttctggcggctctggctctgacatcaagctgcagcagtctggcgccgaacttgctagacctggcgcctctgtgaagatgagctgcaagaccagcggctacaccttcaccagatacaccatgcactgggtcaagcagaggcctggacagggactcgagtggatcggctacatcaaccccagcagaggctacaccaactacaaccagaagttcaaggacaaggccacactgaccaccgacaagagcagcagcacagcctacatgcagctgagcagcctgaccagcgaagatagcgccgtgtactactgcgcccggtactacgacgatcactacagcctggattactggggccagggcacaaccctgacagtgtcatctgcttcgaccaagggcccatccgtgtttcctctggctcccagcagcaagtctacaagcggaggaacagccgctctgggctgcctggtcaaggattactttcccgagcctgtgaccgtgtcctggaattctggcgctctgacaagcggcgtgcacacctttccagctgtgctgcaaagcagcggcctgtactctctgagcagcgtggtcacagtgcctagctctagcctgggcacccagacctacatctgcaatgtgaaccacaagcctagcaacaccaaggtggacaagaaggtggaacccaagagctgcgataagacccacacatgtcctccatgtcctgctccagaggctgctggtggcccttccgtgtttctgttccctccaaagcctaaggacaccctgatgatcagcaggacccctgaagtgacctgcgtggtggtggatgtgtctcacgaggacccagaagtgaagttcaattggtacgtggacggcgtggaagtgcacaacgccaagaccaagcctagagaggaacagtacaacagcacctacagagtggtgtccgtgctgaccgtgctgcaccaggattggctgaacggcaaagagtacaagtgcaaggtgtccaacaaggccctggccgctcctatcgagaaaaccatcagcaaggccaagggccagcctcgcgaacctcaagtctgtacactgcctcctagccgggacgagctgaccaagaatcaggtgtcactgagctgcgccgtgaagggcttttaccccagcgacattgccgtggaatgggagagcaatggccagccagagaacaactacaagacaacccctcctgtgctggacagcgacggctcatttttcctggtgtccaagctgacagtggacaagagcagatggcagcagggcaacgtgttcagctgcagcgtgatgcacgaggccctgcacaaccactacacccagaaaagcctgtctctgagccctggc

SEQ ID NO: 162 - protein, 325 aa, synthetic construct
  source 1..325: note = TgCD28csGSbCD3L
DIQMTQSPSSLSASVGDRVTITCHASQNIYVWLNWYQQKPGKAPKLLIYKASNLHTGVPSRFSGSGSGTDFTLTISSLQPEDFATYYCQQGQTYPYTFGGGTKVEIKGGSGSDIQLTQSPAIMSASPGEKVTMTCRASSSVSYMNWYQQKSGTSPKRWIYDTSKVASGVPYRFSGSGSGTSYSLTISSMEAEDAATYYCQQWSSNPLTFGAGTKLELKRTVAAPSVFIFPPSDEQLKSGTASVVCLLNNFYPREAKVQWKVDNALQSGNSQESVTEQDSKDSTYSLSSTLTLSKADYEKHKVYACEVTHQGLSSPVTKSFNRGEC

SEQ ID NO: 163 - DNA, 975 bp, synthetic construct
  source 1..975: mol_type = other DNA; note = TgCD28csGSbCD3L
gacatccagatgacacagagccctagcagcctgtctgccagcgtgggagacagagtgaccatcacatgtcacgccagccagaacatctacgtgtggctgaactggtatcagcagaagcccggcaaggcccctaagctgctgatctacaaggccagcaatctgcacaccggcgtgcccagcagattttctggctctggcagcggcaccgacttcaccctgaccatatctagcctgcagcctgaggacttcgccacctactattgtcagcagggccagacatacccctacacctttggcggcggaacaaaggtggaaatcaagggcggctctggctctgacatccagctgacacagagccctgccatcatgtctgctagccctggcgagaaagtgaccatgacctgtagagccagcagcagcgtgtcctacatgaactggtatcagcagaagtccggcacaagccccaagcggtggatctacgatacaagcaaggtggccagcggcgtgccctacagattttctggctctggcagcggcaccagctacagcctgacaatcagcagcatggaagccgaggatgccgccacctactactgccagcagtggtccagcaatcccctgacatttggagccggcaccaagctggaactgaagcgtacggtggccgctcccagcgtgttcatcttcccacctagcgacgagcagctgaagtccggcacagcctctgtcgtgtgcctgctgaacaacttctacccccgcgaggccaaagtgcagtggaaggtggacaacgccctgcagagcggcaacagccaggaaagcgtgaccgagcaggacagcaaggactccacctacagcctgagcagcaccctgacactgagcaaggccgactacgagaagcacaaggtgtacgcctgcgaagtgacccaccagggcctgtctagccccgtgaccaagagcttcaaccggggcgagtgt

SEQ ID NO: 164 - protein, 575 aa, synthetic construct
  source 1..575: note = TgCD28csCl3bCD3csHholeLALAPA
QVQLVQSGAEVKKPGASVKVSCKASGYTFTSYYIHWVRQAPGQGLEWIGSIYPGNVNTNYNEKFKDRATLTVDTSISTAYMELSRLRSDDTAVYFCTRSHYGLDWNFDVWGQGTTVTVSSGPSGLVGDIKLQQSGAELARPGASVKMSCKTSGYTFTRYTMHWVKQRPGQGLEWIGYINPSRGYTNYNQKFKDKATLTTDKSSSTAYMQLSSLTSEDSAVYYCARYYDDHYSLDYWGQGTTLTVSSASTKGPSVFPLAPSSKSTSGGTAALGCLVKDYFPEPVTVSWNSGALTSGVHTFPAVLQSSGLYSLSSVVTVPSSSLGTQTYICNVNHKPSNTKVDKKVEPKSCDKTHTCPPCPAPEAAGGPSVFLFPPKPKDTLMISRTPEVTCVVVDVSHEDPEVKFNWYVDGVEVHNAKTKPREEQYNSTYRVVSVLTVLHQDWLNGKEYKCKVSNKALAAPIEKTISKAKGQPREPQVCTLPPSRDELTKNQVSLSCAVKGFYPSDIAVEWESNGQPENNYKTTPPVLDSDGSFFLVSKLTVDKSRWQQGNVFSCSVMHEALHNHYTQKSLSLSPG

SEQ ID NO: 165 - DNA, 1725 bp, synthetic construct
  source 1..1725: mol_type = other DNA; note = TgCD28csCl3bCD3csHholeLALAPA
caggttcagctggttcagtctggcgccgaagtgaagaaacctggcgcctctgtgaaggtgtcctgcaaggccagcggctacacctttaccagctactacatccactgggtccgacaggcccctggacaaggactggaatggatcggcagcatctaccccggcaacgtgaacaccaactacaacgagaagttcaaggaccgggccacactgaccgtggacacctctatcagcaccgcctacatggaactgagccggctgagatccgatgataccgccgtgtacttctgcaccagaagccactacggcctggactggaacttcgatgtgtggggccagggcaccaccgtgacagtttcttctggaccttccggacttgtcggagacatcaagctgcagcagtctggcgccgaacttgctagacctggcgcctctgtgaagatgagctgcaagaccagcggctacaccttcaccagatacaccatgcactgggtcaagcagaggcctggacagggactcgagtggatcggctacatcaaccccagcagaggctacaccaactacaaccagaagttcaaggacaaggccacactgaccaccgacaagagcagcagcacagcctacatgcagctgagcagcctgaccagcgaagatagcgccgtgtactactgcgcccggtactacgacgatcactacagcctggattactggggccagggcacaaccctgacagtgtcatctgcttcgaccaagggcccatccgtgtttcctctggctcccagcagcaagtctacaagcggaggaacagccgctctgggctgcctggtcaaggattactttcccgagcctgtgaccgtgtcctggaattctggcgctctgacaagcggcgtgcacacctttccagctgtgctgcaaagcagcggcctgtactctctgagcagcgtggtcacagtgcctagctctagcctgggcacccagacctacatctgcaatgtgaaccacaagcctagcaacaccaaggtggacaagaaggtggaacccaagagctgcgataagacccacacatgtcctccatgtcctgctccagaggctgctggtggcccttccgtgtttctgttccctccaaagcctaaggacaccctgatgatcagcaggacccctgaagtgacctgcgtggtggtggatgtgtctcacgaggacccagaagtgaagttcaattggtacgtggacggcgtggaagtgcacaacgccaagaccaagcctagagaggaacagtacaacagcacctacagagtggtgtccgtgctgaccgtgctgcaccaggattggctgaacggcaaagagtacaagtgcaaggtgtccaacaaggccctggccgctcctatcgagaaaaccatcagcaaggccaagggccagcctcgcgaacctcaagtctgtacactgcctcctagccgggacgagctgaccaagaatcaggtgtcactgagctgcgccgtgaagggcttttaccccagcgacattgccgtggaatgggagagcaatggccagccagagaacaactacaagacaacccctcctgtgctggacagcgacggctcatttttcctggtgtccaagctgacagtggacaagagcagatggcagcagggcaacgtgttcagctgcagcgtgatgcacgaggccctgcacaaccactacacccagaaaagcctgtctctgagccctggc

SEQ ID NO: 166 - protein, 327 aa, synthetic construct
  source 1..327: note = TgCD28csMMP13bCD3L
DIQMTQSPSSLSASVGDRVTITCHASQNIYVWLNWYQQKPGKAPKLLIYKASNLHTGVPSRFSGSGSGTDFTLTISSLQPEDFATYYCQQGQTYPYTFGGGTKVEIKGPSGLVGDIQLTQSPAIMSASPGEKVTMTCRASSSVSYMNWYQQKSGTSPKRWIYDTSKVASGVPYRFSGSGSGTSYSLTISSMEAEDAATYYCQQWSSNPLTFGAGTKLELKRTVAAPSVFIFPPSDEQLKSGTASVVCLLNNFYPREAKVQWKVDNALQSGNSQESVTEQDSKDSTYSLSSTLTLSKADYEKHKVYACEVTHQGLSSPVTKSFNRGEC

SEQ ID NO: 167 - DNA, 981 bp, synthetic construct
  source 1..981: mol_type = other DNA; note = TgCD28csMMP13bCD3L
gacatccagatgacacagagccctagcagcctgtctgccagcgtgggagacagagtgaccatcacatgtcacgccagccagaacatctacgtgtggctgaactggtatcagcagaagcccggcaaggcccctaagctgctgatctacaaggccagcaatctgcacaccggcgtgcccagcagattttctggctctggcagcggcaccgacttcaccctgaccatatctagcctgcagcctgaggacttcgccacctactattgtcagcagggccagacatacccctacacctttggcggcggaacaaaggtggaaatcaagggaccttccggacttgtcggagacatccagctgacacagagccctgccatcatgtctgctagccctggcgagaaagtgaccatgacctgtagagccagcagcagcgtgtcctacatgaactggtatcagcagaagtccggcacaagccccaagcggtggatctacgatacaagcaaggtggccagcggcgtgccctacagattttctggctctggcagcggcaccagctacagcctgacaatcagcagcatggaagccgaggatgccgccacctactactgccagcagtggtccagcaatcccctgacatttggagccggcaccaagctggaactgaagcgtacggtggccgctcccagcgtgttcatcttcccacctagcgacgagcagctgaagtccggcacagcctctgtcgtgtgcctgctgaacaacttctacccccgcgaggccaaagtgcagtggaaggtggacaacgccctgcagagcggcaacagccaggaaagcgtgaccgagcaggacagcaaggactccacctacagcctgagcagcaccctgacactgagcaaggccgactacgagaagcacaaggtgtacgcctgcgaagtgacccaccagggcctgtctagccccgtgaccaagagcttcaaccggggcgagtgt

SEQ ID NO: 168 - protein, 575 aa, synthetic construct
  source 1..575: note = TgCD28csCl6bCD3csHholeLALAPA
QVQLVQSGAEVKKPGASVKVSCKASGYTFTSYYIHWVRQAPGQGLEWIGSIYPGNVNTNYNEKFKDRATLTVDTSISTAYMELSRLRSDDTAVYFCTRSHYGLDWNFDVWGQGTTVTVSSGPAGLVGDIKLQQSGAELARPGASVKMSCKTSGYTFTRYTMHWVKQRPGQGLEWIGYINPSRGYTNYNQKFKDKATLTTDKSSSTAYMQLSSLTSEDSAVYYCARYYDDHYSLDYWGQGTTLTVSSASTKGPSVFPLAPSSKSTSGGTAALGCLVKDYFPEPVTVSWNSGALTSGVHTFPAVLQSSGLYSLSSVVTVPSSSLGTQTYICNVNHKPSNTKVDKKVEPKSCDKTHTCPPCPAPEAAGGPSVFLFPPKPKDTLMISRTPEVTCVVVDVSHEDPEVKFNWYVDGVEVHNAKTKPREEQYNSTYRVVSVLTVLHQDWLNGKEYKCKVSNKALAAPIEKTISKAKGQPREPQVCTLPPSRDELTKNQVSLSCAVKGFYPSDIAVEWESNGQPENNYKTTPPVLDSDGSFFLVSKLTVDKSRWQQGNVFSCSVMHEALHNHYTQKSLSLSPG

SEQ ID NO: 169 - DNA, 1725 bp, synthetic construct
  source 1..1725: mol_type = other DNA; note = TgCD28csCl6bCD3csHholeLALAPA
caggttcagctggttcagtctggcgccgaagtgaagaaacctggcgcctctgtgaaggtgtcctgcaaggccagcggctacacctttaccagctactacatccactgggtccgacaggcccctggacaaggactggaatggatcggcagcatctaccccggcaacgtgaacaccaactacaacgagaagttcaaggaccgggccacactgaccgtggacacctctatcagcaccgcctacatggaactgagccggctgagatccgatgataccgccgtgtacttctgcaccagaagccactacggcctggactggaacttcgatgtgtggggccagggcaccaccgtgacagtttcttctggacctgctggacttgtcggagacatcaagctgcagcagtctggcgccgaacttgctagacctggcgcctctgtgaagatgagctgcaagaccagcggctacaccttcaccagatacaccatgcactgggtcaagcagaggcctggacagggactcgagtggatcggctacatcaaccccagcagaggctacaccaactacaaccagaagttcaaggacaaggccacactgaccaccgacaagagcagcagcacagcctacatgcagctgagcagcctgaccagcgaagatagcgccgtgtactactgcgcccggtactacgacgatcactacagcctggattactggggccagggcacaaccctgacagtgtcatctgcttcgaccaagggcccatccgtgtttcctctggctcccagcagcaagtctacaagcggaggaacagccgctctgggctgcctggtcaaggattactttcccgagcctgtgaccgtgtcctggaattctggcgctctgacaagcggcgtgcacacctttccagctgtgctgcaaagcagcggcctgtactctctgagcagcgtggtcacagtgcctagctctagcctgggcacccagacctacatctgcaatgtgaaccacaagcctagcaacaccaaggtggacaagaaggtggaacccaagagctgcgataagacccacacatgtcctccatgtcctgctccagaggctgctggtggcccttccgtgtttctgttccctccaaagcctaaggacaccctgatgatcagcaggacccctgaagtgacctgcgtggtggtggatgtgtctcacgaggacccagaagtgaagttcaattggtacgtggacggcgtggaagtgcacaacgccaagaccaagcctagagaggaacagtacaacagcacctacagagtggtgtccgtgctgaccgtgctgcaccaggattggctgaacggcaaagagtacaagtgcaaggtgtccaacaaggccctggccgctcctatcgagaaaaccatcagcaaggccaagggccagcctcgcgaacctcaagtctgtacactgcctcctagccgggacgagctgaccaagaatcaggtgtcactgagctgcgccgtgaagggcttttaccccagcgacattgccgtggaatgggagagcaatggccagccagagaacaactacaagacaacccctcctgtgctggacagcgacggctcatttttcctggtgtccaagctgacagtggacaagagcagatggcagcagggcaacgtgttcagctgcagcgtgatgcacgaggccctgcacaaccactacacccagaaaagcctgtctctgagccctggc

SEQ ID NO: 170 - protein, 327 aa, synthetic construct
  source 1..327: note = TgCD28csCl6bCD3L
DIQMTQSPSSLSASVGDRVTITCHASQNIYVWLNWYQQKPGKAPKLLIYKASNLHTGVPSRFSGSGSGTDFTLTISSLQPEDFATYYCQQGQTYPYTFGGGTKVEIKGPAGLVGDIQLTQSPAIMSASPGEKVTMTCRASSSVSYMNWYQQKSGTSPKRWIYDTSKVASGVPYRFSGSGSGTSYSLTISSMEAEDAATYYCQQWSSNPLTFGAGTKLELKRTVAAPSVFIFPPSDEQLKSGTASVVCLLNNFYPREAKVQWKVDNALQSGNSQESVTEQDSKDSTYSLSSTLTLSKADYEKHKVYACEVTHQGLSSPVTKSFNRGEC

SEQ ID NO: 171 - DNA, 981 bp, synthetic construct
  source 1..981: mol_type = other DNA; note = TgCD28csCl6bCD3L
gacatccagatgacacagagccctagcagcctgtctgccagcgtgggagacagagtgaccatcacatgtcacgccagccagaacatctacgtgtggctgaactggtatcagcagaagcccggcaaggcccctaagctgctgatctacaaggccagcaatctgcacaccggcgtgcccagcagattttctggctctggcagcggcaccgacttcaccctgaccatatctagcctgcagcctgaggacttcgccacctactattgtcagcagggccagacatacccctacacctttggcggcggaacaaaggtggaaatcaagggacctgctggacttgtcggagacatccagctgacacagagccctgccatcatgtctgctagccctggcgagaaagtgaccatgacctgtagagccagcagcagcgtgtcctacatgaactggtatcagcagaagtccggcacaagccccaagcggtggatctacgatacaagcaaggtggccagcggcgtgccctacagattttctggctctggcagcggcaccagctacagcctgacaatcagcagcatggaagccgaggatgccgccacctactactgccagcagtggtccagcaatcccctgacatttggagccggcaccaagctggaactgaagcgtacggtggccgctcccagcgtgttcatcttcccacctagcgacgagcagctgaagtccggcacagcctctgtcgtgtgcctgctgaacaacttctacccccgcgaggccaaagtgcagtggaaggtggacaacgccctgcagagcggcaacagccaggaaagcgtgaccgagcaggacagcaaggactccacctacagcctgagcagcaccctgacactgagcaaggccgactacgagaagcacaaggtgtacgcctgcgaagtgacccaccagggcctgtctagccccgtgaccaagagcttcaaccggggcgagtgt

SEQ ID NO: 172 - protein, 576 aa, synthetic construct
  source 1..576: note = TgCD28csCl7bCD3csHholeLALAPA
QVQLVQSGAEVKKPGASVKVSCKASGYTFTSYYIHWVRQAPGQGLEWIGSIYPGNVNTNYNEKFKDRATLTVDTSISTAYMELSRLRSDDTAVYFCTRSHYGLDWNFDVWGQGTTVTVSSGPAGLVSGDIKLQQSGAELARPGASVKMSCKTSGYTFTRYTMHWVKQRPGQGLEWIGYINPSRGYTNYNQKFKDKATLTTDKSSSTAYMQLSSLTSEDSAVYYCARYYDDHYSLDYWGQGTTLTVSSASTKGPSVFPLAPSSKSTSGGTAALGCLVKDYFPEPVTVSWNSGALTSGVHTFPAVLQSSGLYSLSSVVTVPSSSLGTQTYICNVNHKPSNTKVDKKVEPKSCDKTHTCPPCPAPEAAGGPSVFLFPPKPKDTLMISRTPEVTCVVVDVSHEDPEVKFNWYVDGVEVHNAKTKPREEQYNSTYRVVSVLTVLHQDWLNGKEYKCKVSNKALAAPIEKTISKAKGQPREPQVCTLPPSRDELTKNQVSLSCAVKGFYPSDIAVEWESNGQPENNYKTTPPVLDSDGSFFLVSKLTVDKSRWQQGNVFSCSVMHEALHNHYTQKSLSLSPG

SEQ ID NO: 173 - DNA, 1728 bp, synthetic construct
  source 1..1728: mol_type = other DNA; note = TgCD28csCl7bCD3csHholeLALAPA
caggttcagctggttcagtctggcgccgaagtgaagaaacctggcgcctctgtgaaggtgtcctgcaaggccagcggctacacctttaccagctactacatccactgggtccgacaggcccctggacaaggactggaatggatcggcagcatctaccccggcaacgtgaacaccaactacaacgagaagttcaaggaccgggccacactgaccgtggacacctctatcagcaccgcctacatggaactgagccggctgagatccgatgataccgccgtgtacttctgcaccagaagccactacggcctggactggaacttcgatgtgtggggccagggcaccaccgtgacagtttcttctggacctgctggacttgtcagcggagacatcaagctgcagcagtctggcgccgaacttgctagacctggcgcctctgtgaagatgagctgcaagaccagcggctacaccttcaccagatacaccatgcactgggtcaagcagaggcctggacagggactcgagtggatcggctacatcaaccccagcagaggctacaccaactacaaccagaagttcaaggacaaggccacactgaccaccgacaagagcagcagcacagcctacatgcagctgagcagcctgaccagcgaagatagcgccgtgtactactgcgcccggtactacgacgatcactacagcctggattactggggccagggcacaaccctgacagtgtcatctgcttcgaccaagggcccatccgtgtttcctctggctcccagcagcaagtctacaagcggaggaacagccgctctgggctgcctggtcaaggattactttcccgagcctgtgaccgtgtcctggaattctggcgctctgacaagcggcgtgcacacctttccagctgtgctgcaaagcagcggcctgtactctctgagcagcgtggtcacagtgcctagctctagcctgggcacccagacctacatctgcaatgtgaaccacaagcctagcaacaccaaggtggacaagaaggtggaacccaagagctgcgataagacccacacatgtcctccatgtcctgctccagaggctgctggtggcccttccgtgtttctgttccctccaaagcctaaggacaccctgatgatcagcaggacccctgaagtgacctgcgtggtggtggatgtgtctcacgaggacccagaagtgaagttcaattggtacgtggacggcgtggaagtgcacaacgccaagaccaagcctagagaggaacagtacaacagcacctacagagtggtgtccgtgctgaccgtgctgcaccaggattggctgaacggcaaagagtacaagtgcaaggtgtccaacaaggccctggccgctcctatcgagaaaaccatcagcaaggccaagggccagcctcgcgaacctcaagtctgtacactgcctcctagccgggacgagctgaccaagaatcaggtgtcactgagctgcgccgtgaagggcttttaccccagcgacattgccgtggaatgggagagcaatggccagccagagaacaactacaagacaacccctcctgtgctggacagcgacggctcatttttcctggtgtccaagctgacagtggacaagagcagatggcagcagggcaacgtgttcagctgcagcgtgatgcacgaggccctgcacaaccactacacccagaaaagcctgtctctgagccctggc

SEQ ID NO: 174 - protein, 328 aa, synthetic construct
  source 1..328: note = TgCD28csCl7bCD3L
DIQMTQSPSSLSASVGDRVTITCHASQNIYVWLNWYQQKPGKAPKLLIYKASNLHTGVPSRFSGSGSGTDFTLTISSLQPEDFATYYCQQGQTYPYTFGGGTKVEIKGPAGLVSGDIQLTQSPAIMSASPGEKVTMTCRASSSVSYMNWYQQKSGTSPKRWIYDTSKVASGVPYRFSGSGSGTSYSLTISSMEAEDAATYYCQQWSSNPLTFGAGTKLELKRTVAAPSVFIFPPSDEQLKSGTASVVCLLNNFYPREAKVQWKVDNALQSGNSQESVTEQDSKDSTYSLSSTLTLSKADYEKHKVYACEVTHQGLSSPVTKSFNRGEC

SEQ ID NO: 175 - DNA, 984 bp, synthetic construct
  source 1..984: mol_type = other DNA; note = TgCD28csCl7bCD3L
gacatccagatgacacagagccctagcagcctgtctgccagcgtgggagacagagtgaccatcacatgtcacgccagccagaacatctacgtgtggctgaactggtatcagcagaagcccggcaaggcccctaagctgctgatctacaaggccagcaatctgcacaccggcgtgcccagcagattttctggctctggcagcggcaccgacttcaccctgaccatatctagcctgcagcctgaggacttcgccacctactattgtcagcagggccagacatacccctacacctttggcggcggaacaaaggtggaaatcaagggacctgctggacttgtcagcggagacatccagctgacacagagccctgccatcatgtctgctagccctggcgagaaagtgaccatgacctgtagagccagcagcagcgtgtcctacatgaactggtatcagcagaagtccggcacaagccccaagcggtggatctacgatacaagcaaggtggccagcggcgtgccctacagattttctggctctggcagcggcaccagctacagcctgacaatcagcagcatggaagccgaggatgccgccacctactactgccagcagtggtccagcaatcccctgacatttggagccggcaccaagctggaactgaagcgtacggtggccgctcccagcgtgttcatcttcccacctagcgacgagcagctgaagtccggcacagcctctgtcgtgtgcctgctgaacaacttctacccccgcgaggccaaagtgcagtggaaggtggacaacgccctgcagagcggcaacagccaggaaagcgtgaccgagcaggacagcaaggactccacctacagcctgagcagcaccctgacactgagcaaggccgactacgagaagcacaaggtgtacgcctgcgaagtgacccaccagggcctgtctagccccgtgaccaagagcttcaaccggggcgagtgt

SEQ ID NO: 176 - protein, 576 aa, synthetic construct
  source 1..576: note = TgCD28cscl5bCD3csHholeLALAPA
QVQLVQSGAEVKKPGASVKVSCKASGYTFTSYYIHWVRQAPGQGLEWIGSIYPGNVNTNYNEKFKDRATLTVDTSISTAYMELSRLRSDDTAVYFCTRSHYGLDWNFDVWGQGTTVTVSSASTRKAGGDIKLQQSGAELARPGASVKMSCKTSGYTFTRYTMHWVKQRPGQGLEWIGYINPSRGYTNYNQKFKDKATLTTDKSSSTAYMQLSSLTSEDSAVYYCARYYDDHYSLDYWGQGTTLTVSSASTKGPSVFPLAPSSKSTSGGTAALGCLVKDYFPEPVTVSWNSGALTSGVHTFPAVLQSSGLYSLSSVVTVPSSSLGTQTYICNVNHKPSNTKVDKKVEPKSCDKTHTCPPCPAPEAAGGPSVFLFPPKPKDTLMISRTPEVTCVVVDVSHEDPEVKFNWYVDGVEVHNAKTKPREEQYNSTYRVVSVLTVLHQDWLNGKEYKCKVSNKALAAPIEKTISKAKGQPREPQVCTLPPSRDELTKNQVSLSCAVKGFYPSDIAVEWESNGQPENNYKTTPPVLDSDGSFFLVSKLTVDKSRWQQGNVFSCSVMHEALHNHYTQKSLSLSPG

SEQ ID NO: 177 - DNA, 1728 bp, synthetic construct
  source 1..1728: mol_type = other DNA; note = TgCD28cscl5bCD3csHholeLALAPA
caggttcagctggttcagtctggcgccgaagtgaagaaacctggcgcctctgtgaaggtgtcctgcaaggccagcggctacacctttaccagctactacatccactgggtccgacaggcccctggacaaggactggaatggatcggcagcatctaccccggcaacgtgaacaccaactacaacgagaagttcaaggaccgggccacactgaccgtggacacctctatcagcaccgcctacatggaactgagccggctgagatccgatgataccgccgtgtacttctgcaccagaagccactacggcctggactggaacttcgatgtgtggggccagggcaccaccgtgacagtttcttctgccagcacacggaaggctggcggagacatcaagctgcagcagtctggcgccgaacttgctagacctggcgcctctgtgaagatgagctgcaagaccagcggctacaccttcaccagatacaccatgcactgggtcaagcagaggcctggacagggactcgagtggatcggctacatcaaccccagcagaggctacaccaactacaaccagaagttcaaggacaaggccacactgaccaccgacaagagcagcagcacagcctacatgcagctgagcagcctgaccagcgaagatagcgccgtgtactactgcgcccggtactacgacgatcactacagcctggattactggggccagggcacaaccctgacagtgtcatctgcttcgaccaagggcccatccgtgtttcctctggctcccagcagcaagtctacaagcggaggaacagccgctctgggctgcctggtcaaggattactttcccgagcctgtgaccgtgtcctggaattctggcgctctgacaagcggcgtgcacacctttccagctgtgctgcaaagcagcggcctgtactctctgagcagcgtggtcacagtgcctagctctagcctgggcacccagacctacatctgcaatgtgaaccacaagcctagcaacaccaaggtggacaagaaggtggaacccaagagctgcgataagacccacacatgtcctccatgtcctgctccagaggctgctggtggcccttccgtgtttctgttccctccaaagcctaaggacaccctgatgatcagcaggacccctgaagtgacctgcgtggtggtggatgtgtctcacgaggacccagaagtgaagttcaattggtacgtggacggcgtggaagtgcacaacgccaagaccaagcctagagaggaacagtacaacagcacctacagagtggtgtccgtgctgaccgtgctgcaccaggattggctgaacggcaaagagtacaagtgcaaggtgtccaacaaggccctggccgctcctatcgagaaaaccatcagcaaggccaagggccagcctcgcgaacctcaagtctgtacactgcctcctagccgggacgagctgaccaagaatcaggtgtcactgagctgcgccgtgaagggcttttaccccagcgacattgccgtggaatgggagagcaatggccagccagagaacaactacaagacaacccctcctgtgctggacagcgacggctcatttttcctggtgtccaagctgacagtggacaagagcagatggcagcagggcaacgtgttcagctgcagcgtgatgcacgaggccctgcacaaccactacacccagaaaagcctgtctctgagccctggc

SEQ ID NO: 178 - protein, 328 aa, synthetic construct
  source 1..328: note = TgCD28cscl5bCD3L
DIQMTQSPSSLSASVGDRVTITCHASQNIYVWLNWYQQKPGKAPKLLIYKASNLHTGVPSRFSGSGSGTDFTLTISSLQPEDFATYYCQQGQTYPYTFGGGTKVEIKASTRKAGGDIQLTQSPAIMSASPGEKVTMTCRASSSVSYMNWYQQKSGTSPKRWIYDTSKVASGVPYRFSGSGSGTSYSLTISSMEAEDAATYYCQQWSSNPLTFGAGTKLELKRTVAAPSVFIFPPSDEQLKSGTASVVCLLNNFYPREAKVQWKVDNALQSGNSQESVTEQDSKDSTYSLSSTLTLSKADYEKHKVYACEVTHQGLSSPVTKSFNRGEC

SEQ ID NO: 179 - DNA, 984 bp, synthetic construct
  source 1..984: mol_type = other DNA; note = TgCD28cscl5bCD3L
gacatccagatgacacagagccctagcagcctgtctgccagcgtgggagacagagtgaccatcacatgtcacgccagccagaacatctacgtgtggctgaactggtatcagcagaagcccggcaaggcccctaagctgctgatctacaaggccagcaatctgcacaccggcgtgcccagcagattttctggctctggcagcggcaccgacttcaccctgaccatatctagcctgcagcctgaggacttcgccacctactattgtcagcagggccagacatacccctacacctttggcggcggaacaaaggtggaaatcaaggccagcacacggaaggctggcggagacatccagctgacacagagccctgccatcatgtctgctagccctggcgagaaagtgaccatgacctgtagagccagcagcagcgtgtcctacatgaactggtatcagcagaagtccggcacaagccccaagcggtggatctacgatacaagcaaggtggccagcggcgtgccctacagattttctggctctggcagcggcaccagctacagcctgacaatcagcagcatggaagccgaggatgccgccacctactactgccagcagtggtccagcaatcccctgacatttggagccggcaccaagctggaactgaagcgtacggtggccgctcccagcgtgttcatcttcccacctagcgacgagcagctgaagtccggcacagcctctgtcgtgtgcctgctgaacaacttctacccccgcgaggccaaagtgcagtggaaggtggacaacgccctgcagagcggcaacagccaggaaagcgtgaccgagcaggacagcaaggactccacctacagcctgagcagcaccctgacactgagcaaggccgactacgagaagcacaaggtgtacgcctgcgaagtgacccaccagggcctgtctagccccgtgaccaagagcttcaaccggggcgagtgt

SEQ ID NO: 180 - protein, 575 aa, synthetic construct
  source 1..575: note = TgCD28cscl8bCD3csHholeLALAPA
QVQLVQSGAEVKKPGASVKVSCKASGYTFTSYYIHWVRQAPGQGLEWIGSIYPGNVNTNYNEKFKDRATLTVDTSISTAYMELSRLRSDDTAVYFCTRSHYGLDWNFDVWGQGTTVTVSSASTRKAGDIKLQQSGAELARPGASVKMSCKTSGYTFTRYTMHWVKQRPGQGLEWIGYINPSRGYTNYNQKFKDKATLTTDKSSSTAYMQLSSLTSEDSAVYYCARYYDDHYSLDYWGQGTTLTVSSASTKGPSVFPLAPSSKSTSGGTAALGCLVKDYFPEPVTVSWNSGALTSGVHTFPAVLQSSGLYSLSSVVTVPSSSLGTQTYICNVNHKPSNTKVDKKVEPKSCDKTHTCPPCPAPEAAGGPSVFLFPPKPKDTLMISRTPEVTCVVVDVSHEDPEVKFNWYVDGVEVHNAKTKPREEQYNSTYRVVSVLTVLHQDWLNGKEYKCKVSNKALAAPIEKTISKAKGQPREPQVCTLPPSRDELTKNQVSLSCAVKGFYPSDIAVEWESNGQPENNYKTTPPVLDSDGSFFLVSKLTVDKSRWQQGNVFSCSVMHEALHNHYTQKSLSLSPG

SEQ ID NO: 181 - DNA, 1725 bp, synthetic construct
  source 1..1725: mol_type = other DNA; note = TgCD28cscl8bCD3csHholeLALAPA
caggttcagctggttcagtctggcgccgaagtgaagaaacctggcgcctctgtgaaggtgtcctgcaaggccagcggctacacctttaccagctactacatccactgggtccgacaggcccctggacaaggactggaatggatcggcagcatctaccccggcaacgtgaacaccaactacaacgagaagttcaaggaccgggccacactgaccgtggacacctctatcagcaccgcctacatggaactgagccggctgagatccgatgataccgccgtgtacttctgcaccagaagccactacggcctggactggaacttcgatgtgtggggccagggcaccaccgtgacagtttcttctgccagcacacggaaggctggagacatcaagctgcagcagtctggcgccgaacttgctagacctggcgcctctgtgaagatgagctgcaagaccagcggctacaccttcaccagatacaccatgcactgggtcaagcagaggcctggacagggactcgagtggatcggctacatcaaccccagcagaggctacaccaactacaaccagaagttcaaggacaaggccacactgaccaccgacaagagcagcagcacagcctacatgcagctgagcagcctgaccagcgaagatagcgccgtgtactactgcgcccggtactacgacgatcactacagcctggattactggggccagggcacaaccctgacagtgtcatctgcttcgaccaagggcccatccgtgtttcctctggctcccagcagcaagtctacaagcggaggaacagccgctctgggctgcctggtcaaggattactttcccgagcctgtgaccgtgtcctggaattctggcgctctgacaagcggcgtgcacacctttccagctgtgctgcaaagcagcggcctgtactctctgagcagcgtggtcacagtgcctagctctagcctgggcacccagacctacatctgcaatgtgaaccacaagcctagcaacaccaaggtggacaagaaggtggaacccaagagctgcgataagacccacacatgtcctccatgtcctgctccagaggctgctggtggcccttccgtgtttctgttccctccaaagcctaaggacaccctgatgatcagcaggacccctgaagtgacctgcgtggtggtggatgtgtctcacgaggacccagaagtgaagttcaattggtacgtggacggcgtggaagtgcacaacgccaagaccaagcctagagaggaacagtacaacagcacctacagagtggtgtccgtgctgaccgtgctgcaccaggattggctgaacggcaaagagtacaagtgcaaggtgtccaacaaggccctggccgctcctatcgagaaaaccatcagcaaggccaagggccagcctcgcgaacctcaagtctgtacactgcctcctagccgggacgagctgaccaagaatcaggtgtcactgagctgcgccgtgaagggcttttaccccagcgacattgccgtggaatgggagagcaatggccagccagagaacaactacaagacaacccctcctgtgctggacagcgacggctcatttttcctggtgtccaagctgacagtggacaagagcagatggcagcagggcaacgtgttcagctgcagcgtgatgcacgaggccctgcacaaccactacacccagaaaagcctgtctctgagccctggc

SEQ ID NO: 182 - protein, 327 aa, synthetic construct
  source 1..327: note = TgCD28cscl8bCD3L
DIQMTQSPSSLSASVGDRVTITCHASQNIYVWLNWYQQKPGKAPKLLIYKASNLHTGVPSRFSGSGSGTDFTLTISSLQPEDFATYYCQQGQTYPYTFGGGTKVEIKASTRKAGDIQLTQSPAIMSASPGEKVTMTCRASSSVSYMNWYQQKSGTSPKRWIYDTSKVASGVPYRFSGSGSGTSYSLTISSMEAEDAATYYCQQWSSNPLTFGAGTKLELKRTVAAPSVFIFPPSDEQLKSGTASVVCLLNNFYPREAKVQWKVDNALQSGNSQESVTEQDSKDSTYSLSSTLTLSKADYEKHKVYACEVTHQGLSSPVTKSFNRGEC

SEQ ID NO: 183 - DNA, 981 bp, synthetic construct
  source 1..981: mol_type = other DNA; note = TgCD28cscl8bCD3L
gacatccagatgacacagagccctagcagcctgtctgccagcgtgggagacagagtgaccatcacatgtcacgccagccagaacatctacgtgtggctgaactggtatcagcagaagcccggcaaggcccctaagctgctgatctacaaggccagcaatctgcacaccggcgtgcccagcagattttctggctctggcagcggcaccgacttcaccctgaccatatctagcctgcagcctgaggacttcgccacctactattgtcagcagggccagacatacccctacacctttggcggcggaacaaaggtggaaatcaaggccagcacacggaaggctggagacatccagctgacacagagccctgccatcatgtctgctagccctggcgagaaagtgaccatgacctgtagagccagcagcagcgtgtcctacatgaactggtatcagcagaagtccggcacaagccccaagcggtggatctacgatacaagcaaggtggccagcggcgtgccctacagattttctggctctggcagcggcaccagctacagcctgacaatcagcagcatggaagccgaggatgccgccacctactactgccagcagtggtccagcaatcccctgacatttggagccggcaccaagctggaactgaagcgtacggtggccgctcccagcgtgttcatcttcccacctagcgacgagcagctgaagtccggcacagcctctgtcgtgtgcctgctgaacaacttctacccccgcgaggccaaagtgcagtggaaggtggacaacgccctgcagagcggcaacagccaggaaagcgtgaccgagcaggacagcaaggactccacctacagcctgagcagcaccctgacactgagcaaggccgactacgagaagcacaaggtgtacgcctgcgaagtgacccaccagggcctgtctagccccgtgaccaagagcttcaaccggggcgagtgt

SEQ ID NO: 184 - protein, 725 aa, synthetic construct
  source 1..725: note = cMetTrop2_317L1knobLALAPA
DIVMTQSPDSLAVSLGERATINCKSSQSLLYTSSQKNYLAWYQQKPGQPPKLLIYWASTRESGVPDRFSGSGSGTDFTLTISSLQAEDVAVYYCQQYYAYPWTFGGGTKLEIKGGSSGEIVLTQSPATLSLSPGERATLSCRASQSVDSYGNSFLHWYQQKPGQAPRLLIYWASNRATGIPARFSGSGSGTDFTLTISSLEPEDFAVYYCQQNNEDLWTFGGGTKLEIKGGGGSGGSGSGGGGSASGSGEVQLVESGGGLVKPGGSLRLSCAASGFTFQNYAMSWVRQAPGKGLEWVSSISSDATYTYYADSVKGRFTISRDNAKNVLYLQMTSLRAEDTAVYYCARHPPSYYYAFDYWGQGTTLTVSSGGSSGQVQLVQSGAEVVKPGASVKLSCKASGYTFTSYWLHWVRQAPGQGLEWVGMIDPSNSDTRFNPNFKDRVTITADTSTSTAYMELSSLRSEDTAVYYCATYKSYVSPLDYWGQGTSVTVSSASGGSGDKTHTCPPCPAPEAAGGPSVFLFPPKPKDTLMISRTPEVTCVVVDVSHEDPEVKFNWYVDGVEVHNAKTKPREEQYNSTYRVVSVLTVLHQDWLNGKEYKCKVSNKALAAPIEKTISKAKGQPREPQVYTLPPCRDELTKNQVSLWCLVKGFYPSDIAVEWESNGQPENNYKTTPPVLDSDGSFFLYSKLTVDKSRWQQGNVFSCSVMHEALHNHYTQKSLSLSPG

SEQ ID NO: 185 - DNA, 2175 bp, synthetic construct
  source 1..2175: mol_type = other DNA; note = cMetTrop2_317L1knobLALAPA
gacatcgtgatgacacagagccctgatagcctggccgtgtctctgggagagagagccaccatcaactgcaagagcagccagagcctgctgtacacctccagccagaagaactacctggcctggtatcagcagaagcccggccagcctcctaagctgctgatctactgggccagcaccagagaaagcggcgtgcccgatagattttctggctctggcagcggcaccgacttcaccctgacaatttctagcctgcaagccgaggacgtggccgtgtactactgccagcagtactacgcttacccctggacctttggcggaggcaccaagctggaaatcaagggcggatcttctggagagatcgtgctgacacagtctcccgccacactgtcactgtctccaggcgaaagagccacactgagctgtagagccagccagagcgtggacagctacggcaatagcttcctgcactggtatcagcagaagcccggacaggctcccagactgctgatctactgggccagcaatagagccacaggcatccccgccagattttctggctctggcagcggcaccgatttcaccctgaccataagcagcctggaacctgaggacttcgccgtgtactactgccagcagaacaacgaggacctgtggacctttggcggaggcaccaagctggaaatcaagggaggcggaggatctggcggatctggaagtggcggcggtggatctgcttctggctctggcgaggtgcagctggttgaatctggcggcggacttgtgaagcctggcggatctctgagactgagctgtgccgccagcggcttcacattccagaactacgccatgagctgggtccgacaggcccctggaaaaggccttgaatgggtgtccagcatcagcagcgacgccacctacacctactacgccgatagcgtgaagggcagattcaccatcagccgggacaacgccaagaacgtgctgtacctgcagatgaccagcctgagagccgaggataccgccgtgtactactgcgccagacatcctcctagctactactatgccttcgactactggggccagggcaccacactgacagtctcttctggaggcagctctggccaggttcagctggttcagtctggcgccgaggttgtgaaacctggcgcctctgtgaagctgagctgtaaagccagcggctacaccttcaccagctactggctgcactgggtccgacaggctccaggacaaggactggaatgggtcggaatgatcgaccccagcaacagcgacacccggttcaaccccaacttcaaggacagagtgaccatcaccgccgacaccagcacaagcaccgcctacatggaactgagcagcctgagaagcgaggacaccgccgtgtactactgcgccacctacaagagctacgtgtcccctctggattactggggccagggcacaagcgtgacagtgtcatctgctagtggcggctccggagataagacccacacatgtcctccatgtcctgctccagaagctgccggcggaccttccgtgtttctgttccctccaaagcctaaggacaccctgatgatcagcaggacccctgaagtgacctgcgtggtggtggatgtgtctcacgaggacccagaagtgaagttcaattggtacgtggacggcgtggaagtgcacaacgccaagaccaagcctagagaggaacagtacaacagcacctacagagtggtgtccgtgctgacagtgctgcaccaggattggctgaacggcaaagagtacaagtgcaaggtgtccaacaaggccctggctgcccctatcgagaaaaccatcagcaaggccaagggccagcctagggaaccccaggtttacacccttcctccatgccgggatgagctgaccaagaaccaggtgtccctgtggtgtctggtcaagggcttctaccccagcgacattgccgtggaatgggagagcaatggccagcctgagaacaactacaagaccacacctcctgtgctggactccgacggatcattcttcctgtacagcaagctgactgtggacaagagcagatggcagcagggcaacgtgttcagctgcagcgtgatgcacgaggccctgcacaaccactacacacagaagtccctgtctctgagccctggc

SEQ ID NO: 186 - protein, 725 aa, synthetic construct
  source 1..725: note = Trop2_317cMetL1knobLALAPA
EIVLTQSPATLSLSPGERATLSCRASQSVDSYGNSFLHWYQQKPGQAPRLLIYWASNRATGIPARFSGSGSGTDFTLTISSLEPEDFAVYYCQQNNEDLWTFGGGTKLEIKGGSSGDIVMTQSPDSLAVSLGERATINCKSSQSLLYTSSQKNYLAWYQQKPGQPPKLLIYWASTRESGVPDRFSGSGSGTDFTLTISSLQAEDVAVYYCQQYYAYPWTFGGGTKLEIKGGGGSGGSGSGGGGSASGSGQVQLVQSGAEVVKPGASVKLSCKASGYTFTSYWLHWVRQAPGQGLEWVGMIDPSNSDTRFNPNFKDRVTITADTSTSTAYMELSSLRSEDTAVYYCATYKSYVSPLDYWGQGTSVTVSSGGSSGEVQLVESGGGLVKPGGSLRLSCAASGFTFQNYAMSWVRQAPGKGLEWVSSISSDATYTYYADSVKGRFTISRDNAKNVLYLQMTSLRAEDTAVYYCARHPPSYYYAFDYWGQGTTLTVSSASGGSGDKTHTCPPCPAPEAAGGPSVFLFPPKPKDTLMISRTPEVTCVVVDVSHEDPEVKFNWYVDGVEVHNAKTKPREEQYNSTYRVVSVLTVLHQDWLNGKEYKCKVSNKALAAPIEKTISKAKGQPREPQVYTLPPCRDELTKNQVSLWCLVKGFYPSDIAVEWESNGQPENNYKTTPPVLDSDGSFFLYSKLTVDKSRWQQGNVFSCSVMHEALHNHYTQKSLSLSPG

SEQ ID NO: 187 - DNA, 2175 bp, synthetic construct
  source 1..2175: mol_type = other DNA; note = Trop2_317cMetL1knobLALAPA
gagatcgtgctgacacagtctcccgccacactgtcactgtctccaggcgaaagagccacactgagctgtagagccagccagagcgtggacagctacggcaatagcttcctgcactggtatcagcagaagcccggacaggctcccagactgctgatctactgggccagcaatagagccacaggcatccccgccagattttctggctctggcagcggcaccgatttcaccctgaccataagcagcctggaacctgaggacttcgccgtgtactactgccagcagaacaacgaggacctgtggacctttggcggaggcaccaagctggaaatcaagggcggatcttctggagacatcgtgatgacacagagccctgatagcctggccgtgtctctgggagagagagccaccatcaactgcaagagcagccagagcctgctgtacacctccagccagaagaactacctggcctggtatcagcagaagcccggccagcctcctaagctgctgatctactgggccagcaccagagaaagcggcgtgcccgatagattttctggctctggcagcggcaccgacttcaccctgacaatttctagcctgcaagccgaggacgtggccgtgtactactgccagcagtactacgcttacccctggacctttggcggaggcaccaagctggaaatcaagggaggcggaggatctggcggatctggaagtggcggcggtggatctgcttctggctctggccaggttcagctggttcagtctggcgccgaggttgtgaaacctggcgcctctgtgaagctgagctgtaaagccagcggctacaccttcaccagctactggctgcactgggtccgacaggctccaggacaaggactggaatgggtcggaatgatcgaccccagcaacagcgacacccggttcaaccccaacttcaaggacagagtgaccatcaccgccgacaccagcacaagcaccgcctacatggaactgagcagcctgagaagcgaggacaccgccgtgtactactgcgccacctacaagagctacgtgtcccctctggattactggggccagggcacaagcgtgacagtgtcatctggaggcagctctggcgaggtgcagctggttgaatctggcggcggacttgtgaagcctggcggatctctgagactgagctgtgccgccagcggcttcacattccagaactacgccatgagctgggtccgacaggcccctggaaaaggccttgaatgggtgtccagcatcagcagcgacgccacctacacctactacgccgatagcgtgaagggcagattcaccatcagccgggacaacgccaagaacgtgctgtacctgcagatgaccagcctgagagccgaggataccgccgtgtactactgcgccagacatcctcctagctactactatgccttcgactactggggccagggcaccacactgacagtctcttctgctagtggcggctccggagataagacccacacatgtcctccatgtcctgctccagaagctgccggcggaccttccgtgtttctgttccctccaaagcctaaggacaccctgatgatcagcaggacccctgaagtgacctgcgtggtggtggatgtgtctcacgaggacccagaagtgaagttcaattggtacgtggacggcgtggaagtgcacaacgccaagaccaagcctagagaggaacagtacaacagcacctacagagtggtgtccgtgctgacagtgctgcaccaggattggctgaacggcaaagagtacaagtgcaaggtgtccaacaaggccctggctgcccctatcgagaaaaccatcagcaaggccaagggccagcctagggaaccccaggtttacacccttcctccatgccgggatgagctgaccaagaaccaggtgtccctgtggtgtctggtcaagggcttctaccccagcgacattgccgtggaatgggagagcaatggccagcctgagaacaactacaagaccacacctcctgtgctggactccgacggatcattcttcctgtacagcaagctgactgtggacaagagcagatggcagcagggcaacgtgttcagctgcagcgtgatgcacgaggccctgcacaaccactacacacagaagtccctgtctctgagccctggc

SEQ ID NO: 188 - protein, 573 aa, synthetic construct
  source 1..573: note = TgCD28csGShOKT3HholeLALAPA
QVQLVQSGAEVKKPGASVKVSCKASGYTFTSYYIHWVRQAPGQGLEWIGSIYPGNVNTNYNEKFKDRATLTVDTSISTAYMELSRLRSDDTAVYFCTRSHYGLDWNFDVWGQGTTVTVSSGGSGSQVQLVQSGAEVAKPGASVKVSCKASGYTFTRYTMHWVKQAPGQGLEWIGYINPSRGYTNYAQKFQGKATLTTDKSTSTAYMELSSLRSEDTAVYYCARYYDDHYSLDYWGQGTTLTVSSASTKGPSVFPLAPSSKSTSGGTAALGCLVKDYFPEPVTVSWNSGALTSGVHTFPAVLQSSGLYSLSSVVTVPSSSLGTQTYICNVNHKPSNTKVDKKVEPKSCDKTHTCPPCPAPEAAGGPSVFLFPPKPKDTLMISRTPEVTCVVVDVSHEDPEVKFNWYVDGVEVHNAKTKPREEQYNSTYRVVSVLTVLHQDWLNGKEYKCKVSNKALAAPIEKTISKAKGQPREPQVCTLPPSRDELTKNQVSLSCAVKGFYPSDIAVEWESNGQPENNYKTTPPVLDSDGSFFLVSKLTVDKSRWQQGNVFSCSVMHEALHNHYTQKSLSLSPG

SEQ ID NO: 189 - DNA, 1719 bp, synthetic construct
  source 1..1719: mol_type = other DNA; note = TgCD28csGShOKT3HholeLALAPA
caggttcagctggttcagtctggcgccgaagtgaagaaacctggcgcctctgtgaaggtgtcctgcaaggccagcggctacacctttaccagctactacatccactgggtccgacaggcccctggacaaggactggaatggatcggcagcatctaccccggcaacgtgaacaccaactacaacgagaagttcaaggaccgggccacactgaccgtggacacctctatcagcaccgcctacatggaactgagccggctgagatccgatgataccgccgtgtacttctgcaccagaagccactacggcctggactggaacttcgatgtgtggggccagggcaccaccgtgacagtttcttctggcggctctggctctcaggttcagctggttcagtctggcgccgaagtggctaaacctggcgcctccgtgaaggtgtcctgtaaagccagcggctacacattcacccggtacaccatgcactgggtcaagcaggctccaggacagggactcgagtggatcggctacatcaaccccagcagaggctacaccaactacgcccagaagttccagggcaaagccacactgaccaccgacaagagcaccagcaccgcctacatggaactgagcagcctgagaagcgaggacaccgccgtgtactactgtgcccggtactacgacgaccactacagcctggattattggggccagggcacaaccctgaccgtgtcatctgcttcgaccaagggcccatccgtgtttcctctggctcccagcagcaagtctacaagcggaggaacagccgctctgggctgcctggtcaaggattactttcccgagcctgtgaccgtgtcctggaattctggcgctctgacaagcggcgtgcacacctttccagctgtgctgcaaagcagcggcctgtactctctgagcagcgtggtcacagtgcctagctctagcctgggcacccagacctacatctgcaatgtgaaccacaagcctagcaacaccaaggtggacaagaaggtggaacccaagagctgcgataagacccacacatgtcctccatgtcctgctccagaggctgctggtggcccttccgtgtttctgttccctccaaagcctaaggacaccctgatgatcagcaggacccctgaagtgacctgcgtggtggtggatgtgtctcacgaggacccagaagtgaagttcaattggtacgtggacggcgtggaagtgcacaacgccaagaccaagcctagagaggaacagtacaacagcacctacagagtggtgtccgtgctgaccgtgctgcaccaggattggctgaacggcaaagagtacaagtgcaaggtgtccaacaaggccctggccgctcctatcgagaaaaccatcagcaaggccaagggccagcctcgcgaacctcaagtctgtacactgcctcctagccgggacgagctgaccaagaatcaggtgtcactgagctgcgccgtgaagggcttttaccccagcgacattgccgtggaatgggagagcaatggccagccagagaacaactacaagacaacccctcctgtgctggacagcgacggctcatttttcctggtgtccaagctgacagtggacaagagcagatggcagcagggcaacgtgttcagctgcagcgtgatgcacgaggccctgcacaaccactacacccagaaaagcctgtctctgagccctggc

SEQ ID NO: 190 - protein, 325 aa, synthetic construct
  source 1..325: note = TgCD28csGShOKT3L
DIQMTQSPSSLSASVGDRVTITCHASQNIYVWLNWYQQKPGKAPKLLIYKASNLHTGVPSRFSGSGSGTDFTLTISSLQPEDFATYYCQQGQTYPYTFGGGTKVEIKGGSGSDIQLTQSPSSLSASVGDRVTITCRASQSISYLNWYQQKPGKSPKRWIYDTSKLASGVPSRFSGSGSGTDYTLTISSMQPEDAATYYCQQWSSNPLTFGGGTKVEIKRTVAAPSVFIFPPSDEQLKSGTASVVCLLNNFYPREAKVQWKVDNALQSGNSQESVTEQDSKDSTYSLSSTLTLSKADYEKHKVYACEVTHQGLSSPVTKSFNRGEC

SEQ ID NO: 191 - DNA, 975 bp, synthetic construct
  source 1..975: mol_type = other DNA; note = TgCD28csGShOKT3L
gacatccagatgacacagagccctagcagcctgtctgccagcgtgggagacagagtgaccatcacatgtcacgccagccagaacatctacgtgtggctgaactggtatcagcagaagcccggcaaggcccctaagctgctgatctacaaggccagcaatctgcacaccggcgtgcccagcagattttctggctctggcagcggcaccgacttcaccctgaccatatctagcctgcagcctgaggacttcgccacctactattgtcagcagggccagacatacccctacacctttggcggcggaacaaaggtggaaatcaagggcggctctggctctgacatccagctgacacagagcccttctagcctgtctgccagcgtgggcgacagagtgaccatcacatgtagagccagccagagcatcagctacctgaactggtatcagcagaagcccggcaagagccccaagcggtggatctacgatacaagcaagctggcctctggcgtgcccagcagattttctggctctggcagcggcaccgactacaccctgacaatcagcagcatgcagcctgaggatgccgccacctactactgccagcagtggtccagcaatcccctgacatttggcggaggcaccaaggtggaaatcaagcgtacggtggccgctcccagcgtgttcatcttcccacctagcgacgagcagctgaagtccggcacagcctctgtcgtgtgcctgctgaacaacttctacccccgcgaggccaaagtgcagtggaaggtggacaacgccctgcagagcggcaacagccaggaaagcgtgaccgagcaggacagcaaggactccacctacagcctgagcagcaccctgacactgagcaaggccgactacgagaagcacaaggtgtacgcctgcgaagtgacccaccagggcctgtctagccccgtgaccaagagcttcaaccggggcgagtgt

SEQ ID NO: 192 - protein, 575 aa, synthetic construct
  source 1..575: note = TgCD28csCl3hOKT3csHholeLALAPA
QVQLVQSGAEVKKPGASVKVSCKASGYTFTSYYIHWVRQAPGQGLEWIGSIYPGNVNTNYNEKFKDRATLTVDTSISTAYMELSRLRSDDTAVYFCTRSHYGLDWNFDVWGQGTTVTVSSGPSGLVGQVQLVQSGAEVAKPGASVKVSCKASGYTFTRYTMHWVKQAPGQGLEWIGYINPSRGYTNYAQKFQGKATLTTDKSTSTAYMELSSLRSEDTAVYYCARYYDDHYSLDYWGQGTTLTVSSASTKGPSVFPLAPSSKSTSGGTAALGCLVKDYFPEPVTVSWNSGALTSGVHTFPAVLQSSGLYSLSSVVTVPSSSLGTQTYICNVNHKPSNTKVDKKVEPKSCDKTHTCPPCPAPEAAGGPSVFLFPPKPKDTLMISRTPEVTCVVVDVSHEDPEVKFNWYVDGVEVHNAKTKPREEQYNSTYRVVSVLTVLHQDWLNGKEYKCKVSNKALAAPIEKTISKAKGQPREPQVCTLPPSRDELTKNQVSLSCAVKGFYPSDIAVEWESNGQPENNYKTTPPVLDSDGSFFLVSKLTVDKSRWQQGNVFSCSVMHEALHNHYTQKSLSLSPG

SEQ ID NO: 193 - DNA, 1725 bp, synthetic construct
  source 1..1725: mol_type = other DNA; note = TgCD28csCl3hOKT3csHholeLALAPA
caggttcagctggttcagtctggcgccgaagtgaagaaacctggcgcctctgtgaaggtgtcctgcaaggccagcggctacacctttaccagctactacatccactgggtccgacaggcccctggacaaggactggaatggatcggcagcatctaccccggcaacgtgaacaccaactacaacgagaagttcaaggaccgggccacactgaccgtggacacctctatcagcaccgcctacatggaactgagccggctgagatccgatgataccgccgtgtacttctgcaccagaagccactacggcctggactggaacttcgatgtgtggggccagggcaccaccgtgacagtttcttctggaccttccggacttgtcggacaggttcagctggttcagtctggcgccgaagtggctaaacctggcgcctccgtgaaggtgtcctgtaaagccagcggctacacattcacccggtacaccatgcactgggtcaagcaggctccaggacagggactcgagtggatcggctacatcaaccccagcagaggctacaccaactacgcccagaagttccagggcaaagccacactgaccaccgacaagagcaccagcaccgcctacatggaactgagcagcctgagaagcgaggacaccgccgtgtactactgtgcccggtactacgacgaccactacagcctggattattggggccagggcacaaccctgaccgtgtcatctgcttcgaccaagggcccatccgtgtttcctctggctcccagcagcaagtctacaagcggaggaacagccgctctgggctgcctggtcaaggattactttcccgagcctgtgaccgtgtcctggaattctggcgctctgacaagcggcgtgcacacctttccagctgtgctgcaaagcagcggcctgtactctctgagcagcgtggtcacagtgcctagctctagcctgggcacccagacctacatctgcaatgtgaaccacaagcctagcaacaccaaggtggacaagaaggtggaacccaagagctgcgataagacccacacatgtcctccatgtcctgctccagaggctgctggtggcccttccgtgtttctgttccctccaaagcctaaggacaccctgatgatcagcaggacccctgaagtgacctgcgtggtggtggatgtgtctcacgaggacccagaagtgaagttcaattggtacgtggacggcgtggaagtgcacaacgccaagaccaagcctagagaggaacagtacaacagcacctacagagtggtgtccgtgctgaccgtgctgcaccaggattggctgaacggcaaagagtacaagtgcaaggtgtccaacaaggccctggccgctcctatcgagaaaaccatcagcaaggccaagggccagcctcgcgaacctcaagtctgtacactgcctcctagccgggacgagctgaccaagaatcaggtgtcactgagctgcgccgtgaagggcttttaccccagcgacattgccgtggaatgggagagcaatggccagccagagaacaactacaagacaacccctcctgtgctggacagcgacggctcatttttcctggtgtccaagctgacagtggacaagagcagatggcagcagggcaacgtgttcagctgcagcgtgatgcacgaggccctgcacaaccactacacccagaaaagcctgtctctgagccctggc

SEQ ID NO: 194 - protein, 327 aa, synthetic construct
  source 1..327: note = TgCD28csMMP13hOKT3L
DIQMTQSPSSLSASVGDRVTITCHASQNIYVWLNWYQQKPGKAPKLLIYKASNLHTGVPSRFSGSGSGTDFTLTISSLQPEDFATYYCQQGQTYPYTFGGGTKVEIKGPSGLVGDIQLTQSPSSLSASVGDRVTITCRASQSISYLNWYQQKPGKSPKRWIYDTSKLASGVPSRFSGSGSGTDYTLTISSMQPEDAATYYCQQWSSNPLTFGGGTKVEIKRTVAAPSVFIFPPSDEQLKSGTASVVCLLNNFYPREAKVQWKVDNALQSGNSQESVTEQDSKDSTYSLSSTLTLSKADYEKHKVYACEVTHQGLSSPVTKSFNRGEC

SEQ ID NO: 195 - DNA, 981 bp, synthetic construct
  source 1..981: mol_type = other DNA; note = TgCD28csMMP13hOKT3L
gacatccagatgacacagagccctagcagcctgtctgccagcgtgggagacagagtgaccatcacatgtcacgccagccagaacatctacgtgtggctgaactggtatcagcagaagcccggcaaggcccctaagctgctgatctacaaggccagcaatctgcacaccggcgtgcccagcagattttctggctctggcagcggcaccgacttcaccctgaccatatctagcctgcagcctgaggacttcgccacctactattgtcagcagggccagacatacccctacacctttggcggcggaacaaaggtggaaatcaagggaccttccggacttgtcggagacatccagctgacacagagcccttctagcctgtctgccagcgtgggcgacagagtgaccatcacatgtagagccagccagagcatcagctacctgaactggtatcagcagaagcccggcaagagccccaagcggtggatctacgatacaagcaagctggcctctggcgtgcccagcagattttctggctctggcagcggcaccgactacaccctgacaatcagcagcatgcagcctgaggatgccgccacctactactgccagcagtggtccagcaatcccctgacatttggcggaggcaccaaggtggaaatcaagcgtacggtggccgctcccagcgtgttcatcttcccacctagcgacgagcagctgaagtccggcacagcctctgtcgtgtgcctgctgaacaacttctacccccgcgaggccaaagtgcagtggaaggtggacaacgccctgcagagcggcaacagccaggaaagcgtgaccgagcaggacagcaaggactccacctacagcctgagcagcaccctgacactgagcaaggccgactacgagaagcacaaggtgtacgcctgcgaagtgacccaccagggcctgtctagccccgtgaccaagagcttcaaccggggcgagtgt

SEQ ID NO: 196 - protein, 576 aa, synthetic construct
  source 1..576: note = TgCD28cscl5hOKT3csHholeLALAPA
QVQLVQSGAEVKKPGASVKVSCKASGYTFTSYYIHWVRQAPGQGLEWIGSIYPGNVNTNYNEKFKDRATLTVDTSISTAYMELSRLRSDDTAVYFCTRSHYGLDWNFDVWGQGTTVTVSSASTRKAGGQVQLVQSGAEVAKPGASVKVSCKASGYTFTRYTMHWVKQAPGQGLEWIGYINPSRGYTNYAQKFQGKATLTTDKSTSTAYMELSSLRSEDTAVYYCARYYDDHYSLDYWGQGTTLTVSSASTKGPSVFPLAPSSKSTSGGTAALGCLVKDYFPEPVTVSWNSGALTSGVHTFPAVLQSSGLYSLSSVVTVPSSSLGTQTYICNVNHKPSNTKVDKKVEPKSCDKTHTCPPCPAPEAAGGPSVFLFPPKPKDTLMISRTPEVTCVVVDVSHEDPEVKFNWYVDGVEVHNAKTKPREEQYNSTYRVVSVLTVLHQDWLNGKEYKCKVSNKALAAPIEKTISKAKGQPREPQVCTLPPSRDELTKNQVSLSCAVKGFYPSDIAVEWESNGQPENNYKTTPPVLDSDGSFFLVSKLTVDKSRWQQGNVFSCSVMHEALHNHYTQKSLSLSPG

SEQ ID NO: 197 - DNA, 1728 bp, synthetic construct
  source 1..1728: mol_type = other DNA; note = TgCD28cscl5hOKT3csHholeLALAPA
caggttcagctggttcagtctggcgccgaagtgaagaaacctggcgcctctgtgaaggtgtcctgcaaggccagcggctacacctttaccagctactacatccactgggtccgacaggcccctggacaaggactggaatggatcggcagcatctaccccggcaacgtgaacaccaactacaacgagaagttcaaggaccgggccacactgaccgtggacacctctatcagcaccgcctacatggaactgagccggctgagatccgatgataccgccgtgtacttctgcaccagaagccactacggcctggactggaacttcgatgtgtggggccagggcaccaccgtgacagtttcttctgccagcacacggaaggctggcggacaggttcagctggttcagtctggcgccgaagtggctaaacctggcgcctccgtgaaggtgtcctgtaaagccagcggctacacattcacccggtacaccatgcactgggtcaagcaggctccaggacagggactcgagtggatcggctacatcaaccccagcagaggctacaccaactacgcccagaagttccagggcaaagccacactgaccaccgacaagagcaccagcaccgcctacatggaactgagcagcctgagaagcgaggacaccgccgtgtactactgtgcccggtactacgacgaccactacagcctggattattggggccagggcacaaccctgaccgtgtcatctgcttcgaccaagggcccatccgtgtttcctctggctcccagcagcaagtctacaagcggaggaacagccgctctgggctgcctggtcaaggattactttcccgagcctgtgaccgtgtcctggaattctggcgctctgacaagcggcgtgcacacctttccagctgtgctgcaaagcagcggcctgtactctctgagcagcgtggtcacagtgcctagctctagcctgggcacccagacctacatctgcaatgtgaaccacaagcctagcaacaccaaggtggacaagaaggtggaacccaagagctgcgataagacccacacatgtcctccatgtcctgctccagaggctgctggtggcccttccgtgtttctgttccctccaaagcctaaggacaccctgatgatcagcaggacccctgaagtgacctgcgtggtggtggatgtgtctcacgaggacccagaagtgaagttcaattggtacgtggacggcgtggaagtgcacaacgccaagaccaagcctagagaggaacagtacaacagcacctacagagtggtgtccgtgctgaccgtgctgcaccaggattggctgaacggcaaagagtacaagtgcaaggtgtccaacaaggccctggccgctcctatcgagaaaaccatcagcaaggccaagggccagcctcgcgaacctcaagtctgtacactgcctcctagccgggacgagctgaccaagaatcaggtgtcactgagctgcgccgtgaagggcttttaccccagcgacattgccgtggaatgggagagcaatggccagccagagaacaactacaagacaacccctcctgtgctggacagcgacggctcatttttcctggtgtccaagctgacagtggacaagagcagatggcagcagggcaacgtgttcagctgcagcgtgatgcacgaggccctgcacaaccactacacccagaaaagcctgtctctgagccctggc

SEQ ID NO: 198 - protein, 328 aa, synthetic construct
  source 1..328: note = TgCD28cshep12hOKT3L
DIQMTQSPSSLSASVGDRVTITCHASQNIYVWLNWYQQKPGKAPKLLIYKASNLHTGVPSRFSGSGSGTDFTLTISSLQPEDFATYYCQQGQTYPYTFGGGTKVEIKASTRKAGGDIQLTQSPSSLSASVGDRVTITCRASQSISYLNWYQQKPGKSPKRWIYDTSKLASGVPSRFSGSGSGTDYTLTISSMQPEDAATYYCQQWSSNPLTFGGGTKVEIKRTVAAPSVFIFPPSDEQLKSGTASVVCLLNNFYPREAKVQWKVDNALQSGNSQESVTEQDSKDSTYSLSSTLTLSKADYEKHKVYACEVTHQGLSSPVTKSFNRGEC

SEQ ID NO: 199 - DNA, 984 bp, synthetic construct
  source 1..984: mol_type = other DNA; note = TgCD28cshep12hOKT3L
gacatccagatgacacagagccctagcagcctgtctgccagcgtgggagacagagtgaccatcacatgtcacgccagccagaacatctacgtgtggctgaactggtatcagcagaagcccggcaaggcccctaagctgctgatctacaaggccagcaatctgcacaccggcgtgcccagcagattttctggctctggcagcggcaccgacttcaccctgaccatatctagcctgcagcctgaggacttcgccacctactattgtcagcagggccagacatacccctacacctttggcggcggaacaaaggtggaaatcaaggccagcacacggaaggctggcggagacatccagctgacacagagcccttctagcctgtctgccagcgtgggcgacagagtgaccatcacatgtagagccagccagagcatcagctacctgaactggtatcagcagaagcccggcaagagccccaagcggtggatctacgatacaagcaagctggcctctggcgtgcccagcagattttctggctctggcagcggcaccgactacaccctgacaatcagcagcatgcagcctgaggatgccgccacctactactgccagcagtggtccagcaatcccctgacatttggcggaggcaccaaggtggaaatcaagcgtacggtggccgctcccagcgtgttcatcttcccacctagcgacgagcagctgaagtccggcacagcctctgtcgtgtgcctgctgaacaacttctacccccgcgaggccaaagtgcagtggaaggtggacaacgccctgcagagcggcaacagccaggaaagcgtgaccgagcaggacagcaaggactccacctacagcctgagcagcaccctgacactgagcaaggccgactacgagaagcacaaggtgtacgcctgcgaagtgacccaccagggcctgtctagccccgtgaccaagagcttcaaccggggcgagtgt

SEQ ID NO: 200 - protein, 576 aa, synthetic construct
  source 1..576: note = TgCD28csCL10hOKT3csHholeLALAPA
QVQLVQSGAEVKKPGASVKVSCKASGYTFTSYYIHWVRQAPGQGLEWIGSIYPGNVNTNYNEKFKDRATLTVDTSISTAYMELSRLRSDDTAVYFCTRSHYGLDWNFDVWGQGTTVTVSSGLVGRKAGQVQLVQSGAEVAKPGASVKVSCKASGYTFTRYTMHWVKQAPGQGLEWIGYINPSRGYTNYAQKFQGKATLTTDKSTSTAYMELSSLRSEDTAVYYCARYYDDHYSLDYWGQGTTLTVSSASTKGPSVFPLAPSSKSTSGGTAALGCLVKDYFPEPVTVSWNSGALTSGVHTFPAVLQSSGLYSLSSVVTVPSSSLGTQTYICNVNHKPSNTKVDKKVEPKSCDKTHTCPPCPAPEAAGGPSVFLFPPKPKDTLMISRTPEVTCVVVDVSHEDPEVKFNWYVDGVEVHNAKTKPREEQYNSTYRVVSVLTVLHQDWLNGKEYKCKVSNKALAAPIEKTISKAKGQPREPQVCTLPPSRDELTKNQVSLSCAVKGFYPSDIAVEWESNGQPENNYKTTPPVLDSDGSFFLVSKLTVDKSRWQQGNVFSCSVMHEALHNHYTQKSLSLSPG

SEQ ID NO: 201 - DNA, 1728 bp, synthetic construct
  source 1..1728: mol_type = other DNA; note = TgCD28csCL10hOKT3csHholeLALAPA
caggttcagctggttcagtctggcgccgaagtgaagaaacctggcgcctctgtgaaggtgtcctgcaaggccagcggctacacctttaccagctactacatccactgggtccgacaggcccctggacaaggactggaatggatcggcagcatctaccccggcaacgtgaacaccaactacaacgagaagttcaaggaccgggccacactgaccgtggacacctctatcagcaccgcctacatggaactgagccggctgagatccgatgataccgccgtgtacttctgcaccagaagccactacggcctggactggaacttcgatgtgtggggccagggcaccaccgtgacagtttcttctggactcgtgggaagaaaagccggacaggttcagctggttcagtctggcgccgaagtggctaaacctggcgcctccgtgaaggtgtcctgtaaagccagcggctacacattcacccggtacaccatgcactgggtcaagcaggctccaggacagggactcgagtggatcggctacatcaaccccagcagaggctacaccaactacgcccagaagttccagggcaaagccacactgaccaccgacaagagcaccagcaccgcctacatggaactgagcagcctgagaagcgaggacaccgccgtgtactactgtgcccggtactacgacgaccactacagcctggattattggggccagggcacaaccctgaccgtgtcatctgcttcgaccaagggcccatccgtgtttcctctggctcccagcagcaagtctacaagcggaggaacagccgctctgggctgcctggtcaaggattactttcccgagcctgtgaccgtgtcctggaattctggcgctctgacaagcggcgtgcacacctttccagctgtgctgcaaagcagcggcctgtactctctgagcagcgtggtcacagtgcctagctctagcctgggcacccagacctacatctgcaatgtgaaccacaagcctagcaacaccaaggtggacaagaaggtggaacccaagagctgcgataagacccacacatgtcctccatgtcctgctccagaggctgctggtggcccttccgtgtttctgttccctccaaagcctaaggacaccctgatgatcagcaggacccctgaagtgacctgcgtggtggtggatgtgtctcacgaggacccagaagtgaagttcaattggtacgtggacggcgtggaagtgcacaacgccaagaccaagcctagagaggaacagtacaacagcacctacagagtggtgtccgtgctgaccgtgctgcaccaggattggctgaacggcaaagagtacaagtgcaaggtgtccaacaaggccctggccgctcctatcgagaaaaccatcagcaaggccaagggccagcctcgcgaacctcaagtctgtacactgcctcctagccgggacgagctgaccaagaatcaggtgtcactgagctgcgccgtgaagggcttttaccccagcgacattgccgtggaatgggagagcaatggccagccagagaacaactacaagacaacccctcctgtgctggacagcgacggctcatttttcctggtgtccaagctgacagtggacaagagcagatggcagcagggcaacgtgttcagctgcagcgtgatgcacgaggccctgcacaaccactacacccagaaaagcctgtctctgagccctggc

SEQ ID NO: 202 - protein, 328 aa, synthetic construct
  source 1..328: note = TgCD28cs_hybrid1hOKT3L
DIQMTQSPSSLSASVGDRVTITCHASQNIYVWLNWYQQKPGKAPKLLIYKASNLHTGVPSRFSGSGSGTDFTLTISSLQPEDFATYYCQQGQTYPYTFGGGTKVEIKGLVGRKAGDIQLTQSPSSLSASVGDRVTITCRASQSISYLNWYQQKPGKSPKRWIYDTSKLASGVPSRFSGSGSGTDYTLTISSMQPEDAATYYCQQWSSNPLTFGGGTKVEIKRTVAAPSVFIFPPSDEQLKSGTASVVCLLNNFYPREAKVQWKVDNALQSGNSQESVTEQDSKDSTYSLSSTLTLSKADYEKHKVYACEVTHQGLSSPVTKSFNRGEC

SEQ ID NO: 203 - DNA, 984 bp, synthetic construct
  source 1..984: mol_type = other DNA; note = TgCD28cs_hybrid1hOKT3L
gacatccagatgacacagagccctagcagcctgtctgccagcgtgggagacagagtgaccatcacatgtcacgccagccagaacatctacgtgtggctgaactggtatcagcagaagcccggcaaggcccctaagctgctgatctacaaggccagcaatctgcacaccggcgtgcccagcagattttctggctctggcagcggcaccgacttcaccctgaccatatctagcctgcagcctgaggacttcgccacctactattgtcagcagggccagacatacccctacacctttggcggcggaacaaaggtggaaatcaagggactcgtgggaagaaaagccggagacatccagctgacacagagcccttctagcctgtctgccagcgtgggcgacagagtgaccatcacatgtagagccagccagagcatcagctacctgaactggtatcagcagaagcccggcaagagccccaagcggtggatctacgatacaagcaagctggcctctggcgtgcccagcagattttctggctctggcagcggcaccgactacaccctgacaatcagcagcatgcagcctgaggatgccgccacctactactgccagcagtggtccagcaatcccctgacatttggcggaggcaccaaggtggaaatcaagcgtacggtggccgctcccagcgtgttcatcttcccacctagcgacgagcagctgaagtccggcacagcctctgtcgtgtgcctgctgaacaacttctacccccgcgaggccaaagtgcagtggaaggtggacaacgccctgcagagcggcaacagccaggaaagcgtgaccgagcaggacagcaaggactccacctacagcctgagcagcaccctgacactgagcaaggccgactacgagaagcacaaggtgtacgcctgcgaagtgacccaccagggcctgtctagccccgtgaccaagagcttcaaccggggcgagtgt

SEQ ID NO: 204 - protein, 718 aa, synthetic construct
  source 1..718: note = cMetTrop2_h20L1knobLALAPA
DIVMTQSPDSLAVSLGERATINCKSSQSLLYTSSQKNYLAWYQQKPGQPPKLLIYWASTRESGVPDRFSGSGSGTDFTLTISSLQAEDVAVYYCQQYYAYPWTFGGGTKLEIKGGSSGDIQMTQSPSSLSASVGDRVTITCQASQDINKYLAWYQKKPGKAPKLLIHYTSNLQTGVPSRFSGSGSGTDFTFTISSLQPEDIATYYCLQYDDLFTFGQGTKLEIKGGGGSGGSGSGGGGSASGSGQVQLVQSGAEVKKPGASVKVSCKASGSSFTGYTMNWVKQAPGQGLEWIGIINPYQGDTTYNQKFQGKVTITVDKSTSTVYMELSSLRSEDTAVYYCARGAGLYYFDYWGQGTTVTVSSGGSSGQVQLVQSGAEVVKPGASVKLSCKASGYTFTSYWLHWVRQAPGQGLEWVGMIDPSNSDTRFNPNFKDRVTITADTSTSTAYMELSSLRSEDTAVYYCATYKSYVSPLDYWGQGTSVTVSSASGGSGDKTHTCPPCPAPEAAGGPSVFLFPPKPKDTLMISRTPEVTCVVVDVSHEDPEVKFNWYVDGVEVHNAKTKPREEQYNSTYRVVSVLTVLHQDWLNGKEYKCKVSNKALAAPIEKTISKAKGQPREPQVYTLPPCRDELTKNQVSLWCLVKGFYPSDIAVEWESNGQPENNYKTTPPVLDSDGSFFLYSKLTVDKSRWQQGNVFSCSVMHEALHNHYTQKSLSLSPG

SEQ ID NO: 205 - DNA, 2154 bp, synthetic construct
  source 1..2154: mol_type = other DNA; note = cMetTrop2_h20L1knobLALAPA
gacatcgtgatgacacagagccctgatagcctggccgtgtctctgggagagagagccaccatcaactgcaagagcagccagagcctgctgtacacctccagccagaagaactacctggcctggtatcagcagaagcccggccagcctcctaagctgctgatctactgggccagcaccagagaaagcggcgtgcccgatagattttctggctctggcagcggcaccgacttcaccctgacaatttctagcctgcaagccgaggacgtggccgtgtactactgccagcagtactacgcttacccctggacctttggcggaggcaccaagctggaaatcaagggcggatcttctggagacatccagatgacacagagccctagcagcctgtctgccagcgtgggagacagagtgaccattacctgtcaggccagccaggacatcaacaagtacctggcctggtatcagaagaagcccggcaaggctcctaagctgctgatccactacaccagcaacctgcagacaggcgtgcccagcagattttctggcagcggctctggcaccgacttcaccttcaccataagcagcctgcagcctgaggatatcgccacctactactgcctgcagtacgacgacctgttcacctttggccagggcaccaagctggaaatcaaaggaggcggaggatctggcggatctggaagtggcggcggtggatctgcttctggctctggccaggtgcagctggtgcagtctggcgccgaagttaagaaacctggcgcctccgtgaaggtgtcctgtaaagccagcggcagcagcttcaccggctacaccatgaactgggtcaagcaggctcctggacagggactcgagtggatcggcatcatcaacccctaccagggcgacaccacctacaaccagaagttccagggcaaagtcaccatcaccgtggacaagagcaccagcaccgtgtacatggaactgtccagcctgagaagcgaggacaccgccgtgtactactgtgctagaggcgccggactgtactacttcgactattggggccagggaaccaccgtgaccgttagctctggaggcagctctggccaggttcagctggttcagtctggcgccgaggttgtgaaacctggcgcctctgtgaagctgagctgtaaagccagcggctacaccttcaccagctactggctgcactgggtccgacaggctccaggacaaggactggaatgggtcggaatgatcgaccccagcaacagcgacacccggttcaaccccaacttcaaggacagagtgaccatcaccgccgacaccagcacaagcaccgcctacatggaactgagcagcctgagaagcgaggacaccgccgtgtactactgcgccacctacaagagctacgtgtcccctctggattactggggccagggcacaagcgtgacagtgtcatctgctagtggcggctccggagataagacccacacatgtcctccatgtcctgctccagaagctgccggcggaccttccgtgtttctgttccctccaaagcctaaggacaccctgatgatcagcaggacccctgaagtgacctgcgtggtggtggatgtgtctcacgaggacccagaagtgaagttcaattggtacgtggacggcgtggaagtgcacaacgccaagaccaagcctagagaggaacagtacaacagcacctacagagtggtgtccgtgctgacagtgctgcaccaggattggctgaacggcaaagagtacaagtgcaaggtgtccaacaaggccctggctgcccctatcgagaaaaccatcagcaaggccaagggccagcctagggaaccccaggtttacacccttcctccatgccgggatgagctgaccaagaaccaggtgtccctgtggtgtctggtcaagggcttctaccccagcgacattgccgtggaatgggagagcaatggccagcctgagaacaactacaagaccacacctcctgtgctggactccgacggatcattcttcctgtacagcaagctgactgtggacaagagcagatggcagcagggcaacgtgttcagctgcagcgtgatgcacgaggccctgcacaaccactacacacagaagtccctgtctctgagccctggc

SEQ ID NO: 206 - protein, 718 aa, synthetic construct
  source 1..718: note = Trop2_h20cMetL1knobLALAPA
DIQMTQSPSSLSASVGDRVTITCQASQDINKYLAWYQKKPGKAPKLLIHYTSNLQTGVPSRFSGSGSGTDFTFTISSLQPEDIATYYCLQYDDLFTFGQGTKLEIKGGSSGDIVMTQSPDSLAVSLGERATINCKSSQSLLYTSSQKNYLAWYQQKPGQPPKLLIYWASTRESGVPDRFSGSGSGTDFTLTISSLQAEDVAVYYCQQYYAYPWTFGGGTKLEIKGGGGSGGSGSGGGGSASGSGQVQLVQSGAEVVKPGASVKLSCKASGYTFTSYWLHWVRQAPGQGLEWVGMIDPSNSDTRFNPNFKDRVTITADTSTSTAYMELSSLRSEDTAVYYCATYKSYVSPLDYWGQGTSVTVSSGGSSGQVQLVQSGAEVKKPGASVKVSCKASGSSFTGYTMNWVKQAPGQGLEWIGIINPYQGDTTYNQKFQGKVTITVDKSTSTVYMELSSLRSEDTAVYYCARGAGLYYFDYWGQGTTVTVSSASGGSGDKTHTCPPCPAPEAAGGPSVFLFPPKPKDTLMISRTPEVTCVVVDVSHEDPEVKFNWYVDGVEVHNAKTKPREEQYNSTYRVVSVLTVLHQDWLNGKEYKCKVSNKALAAPIEKTISKAKGQPREPQVYTLPPCRDELTKNQVSLWCLVKGFYPSDIAVEWESNGQPENNYKTTPPVLDSDGSFFLYSKLTVDKSRWQQGNVFSCSVMHEALHNHYTQKSLSLSPG

SEQ ID NO: 207 - DNA, 2154 bp, synthetic construct
  source 1..2154: mol_type = other DNA; note = Trop2_h20cMetL1knobLALAPA
gacatccagatgacacagagccctagcagcctgtctgccagcgtgggagacagagtgaccattacctgtcaggccagccaggacatcaacaagtacctggcctggtatcagaagaagcccggcaaggctcctaagctgctgatccactacaccagcaacctgcagacaggcgtgcccagcagattttctggcagcggctctggcaccgacttcaccttcaccataagcagcctgcagcctgaggatatcgccacctactactgcctgcagtacgacgacctgttcacctttggccagggcaccaagctggaaatcaaaggcggatcttctggagacatcgtgatgacacagagccctgatagcctggccgtgtctctgggagagagagccaccatcaactgcaagagcagccagagcctgctgtacacctccagccagaagaactacctggcctggtatcagcagaagcccggccagcctcctaagctgctgatctactgggccagcaccagagaaagcggcgtgcccgatagattttctggctctggcagcggcaccgacttcaccctgacaatttctagcctgcaagccgaggacgtggccgtgtactactgccagcagtactacgcttacccctggacctttggcggaggcaccaagctggaaatcaagggaggcggaggatctggcggatctggaagtggcggcggtggatctgcttctggctctggccaggttcagctggttcagtctggcgccgaggttgtgaaacctggcgcctctgtgaagctgagctgtaaagccagcggctacaccttcaccagctactggctgcactgggtccgacaggctccaggacaaggactggaatgggtcggaatgatcgaccccagcaacagcgacacccggttcaaccccaacttcaaggacagagtgaccatcaccgccgacaccagcacaagcaccgcctacatggaactgagcagcctgagaagcgaggacaccgccgtgtactactgcgccacctacaagagctacgtgtcccctctggattactggggccagggcacaagcgtgacagtgtcatctggaggcagctctggccaggtgcagctggtgcagtctggcgccgaagttaagaaacctggcgcctccgtgaaggtgtcctgtaaagccagcggcagcagcttcaccggctacaccatgaactgggtcaagcaggctcctggacagggactcgagtggatcggcatcatcaacccctaccagggcgacaccacctacaaccagaagttccagggcaaagtcaccatcaccgtggacaagagcaccagcaccgtgtacatggaactgtccagcctgagaagcgaggacaccgccgtgtactactgtgctagaggcgccggactgtactacttcgactattggggccagggaaccaccgtgaccgttagctctgctagtggcggctccggagataagacccacacatgtcctccatgtcctgctccagaagctgccggcggaccttccgtgtttctgttccctccaaagcctaaggacaccctgatgatcagcaggacccctgaagtgacctgcgtggtggtggatgtgtctcacgaggacccagaagtgaagttcaattggtacgtggacggcgtggaagtgcacaacgccaagaccaagcctagagaggaacagtacaacagcacctacagagtggtgtccgtgctgacagtgctgcaccaggattggctgaacggcaaagagtacaagtgcaaggtgtccaacaaggccctggctgcccctatcgagaaaaccatcagcaaggccaagggccagcctagggaaccccaggtttacacccttcctccatgccgggatgagctgaccaagaaccaggtgtccctgtggtgtctggtcaagggcttctaccccagcgacattgccgtggaatgggagagcaatggccagcctgagaacaactacaagaccacacctcctgtgctggactccgacggatcattcttcctgtacagcaagctgactgtggacaagagcagatggcagcagggcaacgtgttcagctgcagcgtgatgcacgaggccctgcacaaccactacacacagaagtccctgtctctgagccctggc

SEQ ID NO: 208 - protein, 328 aa, synthetic construct
  source 1..328: note = TgCD28cs_ssMMP15hOKT3L
DIQMTQSPSSLSASVGDRVTITCHASQNIYVWLNWYQQKPGKAPKLLIYKASNLHTGVPSRFSGSGSGTDFTLTISSLQPEDFATYYCQQGQTYPYTFGCGTKVEIKGPAGLVSGDIQLTQSPSSLSASVGDRVTITCRASQSISYLNWYQQKPGKSPKRWIYDTSKLASGVPSRFSGSGSGTDYTLTISSMQPEDAATYYCQQWSSNPLTFGGGTKVEIKRTVAAPSVFIFPPSDEQLKSGTASVVCLLNNFYPREAKVQWKVDNALQSGNSQESVTEQDSKDSTYSLSSTLTLSKADYEKHKVYACEVTHQGLSSPVTKSFNRGEC

SEQ ID NO: 209 - DNA, 984 bp, synthetic construct
  source 1..984: mol_type = other DNA; note = TgCD28cs_ssMMP15hOKT3L
gacatccagatgacacagagccctagcagcctgtctgccagcgtgggagacagagtgaccatcacatgtcacgccagccagaacatctacgtgtggctgaactggtatcagcagaagcccggcaaggcccctaagctgctgatctacaaggccagcaatctgcacaccggcgtgcccagcagattttctggctctggcagcggcaccgacttcaccctgaccatatctagcctgcagcctgaggacttcgccacctactattgtcagcagggccagacatacccctacacctttggctgcggaacaaaggtggaaatcaagggacctgctggacttgtcagcggagacatccagctgacacagagcccttctagcctgtctgccagcgtgggcgacagagtgaccatcacatgtagagccagccagagcatcagctacctgaactggtatcagcagaagcccggcaagagccccaagcggtggatctacgatacaagcaagctggcctctggcgtgcccagcagattttctggctctggcagcggcaccgactacaccctgacaatcagcagcatgcagcctgaggatgccgccacctactactgccagcagtggtccagcaatcccctgacatttggcggaggcaccaaggtggaaatcaagcgtacggtggccgctcccagcgtgttcatcttcccacctagcgacgagcagctgaagtccggcacagcctctgtcgtgtgcctgctgaacaacttctacccccgcgaggccaaagtgcagtggaaggtggacaacgccctgcagagcggcaacagccaggaaagcgtgaccgagcaggacagcaaggactccacctacagcctgagcagcaccctgacactgagcaaggccgactacgagaagcacaaggtgtacgcctgcgaagtgacccaccagggcctgtctagccccgtgaccaagagcttcaaccggggcgagtgt

SEQ ID NO: 210 - protein, 576 aa, synthetic construct
  source 1..576: note = TgCD28cs_ssMMP15hOKT3H_HNul
QVQLVQSGAEVKKPGASVKVSCKASGYTFTSYYIHWVRQAPGQCLEWIGSIYPGNVNTNYNEKFKDRATLTVDTSISTAYMELSRLRSDDTAVYFCTRSHYGLDWNFDVWGQGTTVTVSSGPAGLVSGQVQLVQSGAEVAKPGASVKVSCKASGYTFTRYTMHWVKQAPGQGLEWIGYINPSRGYTNYAQKFQGKATLTTDKSTSTAYMELSSLRSEDTAVYYCARYYDDHYSLDYWGQGTTLTVSSASTKGPSVFPLAPSSKSTSGGTAALGCLVKDYFPEPVTVSWNSGALTSGVHTFPAVLQSSGLYSLSSVVTVPSSSLGTQTYICNVNHKPSNTKVDKKVEPKSCDKTHTCPPCPAPEAAGGPSVFLFPPKPKDTLMISRTPEVTCVVVDVSHEDPEVKFNWYVDGVEVHNAKTKPREEQYNSTYRVVSVLTVLHQDWLNGKEYKCKVSNKALAAPIEKTISKAKGQPREPQVCTLPPSRDELTKNQVSLSCAVKGFYPSDIAVEWESNGQPENNYKTTPPVLDSDGSFFLVSKLTVDKSRWQQGNVFSCSVMHEALHNHYTQKSLSLSPG

SEQ ID NO: 211 - DNA, 1728 bp, unidentified
  source 1..1728: mol_type = other DNA; note = TgCD28cs_ssMMP15hOKT3H_HNul
caggttcagctggttcagtctggcgccgaagtgaagaaacctggcgcctctgtgaaggtgtcctgcaaggccagcggctacacctttaccagctactacatccactgggtccgacaggcccctggacaatgcctggaatggatcggcagcatctaccccggcaacgtgaacaccaactacaacgagaagttcaaggaccgggccacactgaccgtggacacctctatcagcaccgcctacatggaactgagccggctgagatccgatgataccgccgtgtacttctgcaccagaagccactacggcctggactggaacttcgatgtgtggggccagggcaccaccgtgacagtttcttctggacctgctggacttgtcagcggacaggttcagctggttcagtctggcgccgaagtggctaaacctggcgcctccgtgaaggtgtcctgtaaagccagcggctacacattcacccggtacaccatgcactgggtcaagcaggctccaggacagggactcgagtggatcggctacatcaaccccagcagaggctacaccaactacgcccagaagttccagggcaaagccacactgaccaccgacaagagcaccagcaccgcctacatggaactgagcagcctgagaagcgaggacaccgccgtgtactactgtgcccggtactacgacgaccactacagcctggattattggggccagggcacaaccctgaccgtgtcatctgcttcgaccaagggcccatccgtgtttcctctggctcccagcagcaagtctacaagcggaggaacagccgctctgggctgcctggtcaaggattactttcccgagcctgtgaccgtgtcctggaattctggcgctctgacaagcggcgtgcacacctttccagctgtgctgcaaagcagcggcctgtactctctgagcagcgtggtcacagtgcctagctctagcctgggcacccagacctacatctgcaatgtgaaccacaagcctagcaacaccaaggtggacaagaaggtggaacccaagagctgcgataagacccacacatgtcctccatgtcctgctccagaggctgctggtggcccttccgtgtttctgttccctccaaagcctaaggacaccctgatgatcagcaggacccctgaagtgacctgcgtggtggtggatgtgtctcacgaggacccagaagtgaagttcaattggtacgtggacggcgtggaagtgcacaacgccaagaccaagcctagagaggaacagtacaacagcacctacagagtggtgtccgtgctgaccgtgctgcaccaggattggctgaacggcaaagagtacaagtgcaaggtgtccaacaaggccctggccgctcctatcgagaaaaccatcagcaaggccaagggccagcctcgcgaacctcaagtctgtacactgcctcctagccgggacgagctgaccaagaatcaggtgtcactgagctgcgccgtgaagggcttttaccccagcgacattgccgtggaatgggagagcaatggccagccagagaacaactacaagacaacccctcctgtgctggacagcgacggctcatttttcctggtgtccaagctgacagtggacaagagcagatggcagcagggcaacgtgttcagctgcagcgtgatgcacgaggccctgcacaaccactacacccagaaaagcctgtctctgagccctggc

SEQ ID NO: 212 - protein, 573 aa, synthetic construct
  source 1..573: note = TgCD28cs_ssGShOKT3HholeLALAPA
QVQLVQSGAEVKKPGASVKVSCKASGYTFTSYYIHWVRQAPGQCLEWIGSIYPGNVNTNYNEKFKDRATLTVDTSISTAYMELSRLRSDDTAVYFCTRSHYGLDWNFDVWGQGTTVTVSSGGSGSQVQLVQSGAEVAKPGASVKVSCKASGYTFTRYTMHWVKQAPGQGLEWIGYINPSRGYTNYAQKFQGKATLTTDKSTSTAYMELSSLRSEDTAVYYCARYYDDHYSLDYWGQGTTLTVSSASTKGPSVFPLAPSSKSTSGGTAALGCLVKDYFPEPVTVSWNSGALTSGVHTFPAVLQSSGLYSLSSVVTVPSSSLGTQTYICNVNHKPSNTKVDKKVEPKSCDKTHTCPPCPAPEAAGGPSVFLFPPKPKDTLMISRTPEVTCVVVDVSHEDPEVKFNWYVDGVEVHNAKTKPREEQYNSTYRVVSVLTVLHQDWLNGKEYKCKVSNKALAAPIEKTISKAKGQPREPQVCTLPPSRDELTKNQVSLSCAVKGFYPSDIAVEWESNGQPENNYKTTPPVLDSDGSFFLVSKLTVDKSRWQQGNVFSCSVMHEALHNHYTQKSLSLSPG

SEQ ID NO: 213 - DNA, 1719 bp, synthetic construct
  source 1..1719: mol_type = other DNA; note = TgCD28cs_ssGShOKT3HholeLALAPA
caggttcagctggttcagtctggcgccgaagtgaagaaacctggcgcctctgtgaaggtgtcctgcaaggccagcggctacacctttaccagctactacatccactgggtccgacaggcccctggacaatgcctggaatggatcggcagcatctaccccggcaacgtgaacaccaactacaacgagaagttcaaggaccgggccacactgaccgtggacacctctatcagcaccgcctacatggaactgagccggctgagatccgatgataccgccgtgtacttctgcaccagaagccactacggcctggactggaacttcgatgtgtggggccagggcaccaccgtgacagtttcttctggcggctctggctctcaggttcagctggttcagtctggcgccgaagtggctaaacctggcgcctccgtgaaggtgtcctgtaaagccagcggctacacattcacccggtacaccatgcactgggtcaagcaggctccaggacagggactcgagtggatcggctacatcaaccccagcagaggctacaccaactacgcccagaagttccagggcaaagccacactgaccaccgacaagagcaccagcaccgcctacatggaactgagcagcctgagaagcgaggacaccgccgtgtactactgtgcccggtactacgacgaccactacagcctggattattggggccagggcacaaccctgaccgtgtcatctgcttcgaccaagggcccatccgtgtttcctctggctcccagcagcaagtctacaagcggaggaacagccgctctgggctgcctggtcaaggattactttcccgagcctgtgaccgtgtcctggaattctggcgctctgacaagcggcgtgcacacctttccagctgtgctgcaaagcagcggcctgtactctctgagcagcgtggtcacagtgcctagctctagcctgggcacccagacctacatctgcaatgtgaaccacaagcctagcaacaccaaggtggacaagaaggtggaacccaagagctgcgataagacccacacatgtcctccatgtcctgctccagaggctgctggtggcccttccgtgtttctgttccctccaaagcctaaggacaccctgatgatcagcaggacccctgaagtgacctgcgtggtggtggatgtgtctcacgaggacccagaagtgaagttcaattggtacgtggacggcgtggaagtgcacaacgccaagaccaagcctagagaggaacagtacaacagcacctacagagtggtgtccgtgctgaccgtgctgcaccaggattggctgaacggcaaagagtacaagtgcaaggtgtccaacaaggccctggccgctcctatcgagaaaaccatcagcaaggccaagggccagcctcgcgaacctcaagtctgtacactgcctcctagccgggacgagctgaccaagaatcaggtgtcactgagctgcgccgtgaagggcttttaccccagcgacattgccgtggaatgggagagcaatggccagccagagaacaactacaagacaacccctcctgtgctggacagcgacggctcatttttcctggtgtccaagctgacagtggacaagagcagatggcagcagggcaacgtgttcagctgcagcgtgatgcacgaggccctgcacaaccactacacccagaaaagcctgtctctgagccctggc

SEQ ID NO: 214 - protein, 325 aa, synthetic construct
  source 1..325: note = TgCD28cs_ssGShOKT3L
DIQMTQSPSSLSASVGDRVTITCHASQNIYVWLNWYQQKPGKAPKLLIYKASNLHTGVPSRFSGSGSGTDFTLTISSLQPEDFATYYCQQGQTYPYTFGCGTKVEIKGGSGSDIQLTQSPSSLSASVGDRVTITCRASQSISYLNWYQQKPGKSPKRWIYDTSKLASGVPSRFSGSGSGTDYTLTISSMQPEDAATYYCQQWSSNPLTFGGGTKVEIKRTVAAPSVFIFPPSDEQLKSGTASVVCLLNNFYPREAKVQWKVDNALQSGNSQESVTEQDSKDSTYSLSSTLTLSKADYEKHKVYACEVTHQGLSSPVTKSFNRGEC

SEQ ID NO: 215 - DNA, 975 bp, synthetic construct
  source 1..975: mol_type = other DNA; note = TgCD28cs_ssGShOKT3L
gacatccagatgacacagagccctagcagcctgtctgccagcgtgggagacagagtgaccatcacatgtcacgccagccagaacatctacgtgtggctgaactggtatcagcagaagcccggcaaggcccctaagctgctgatctacaaggccagcaatctgcacaccggcgtgcccagcagattttctggctctggcagcggcaccgacttcaccctgaccatatctagcctgcagcctgaggacttcgccacctactattgtcagcagggccagacatacccctacacctttggctgcggaacaaaggtggaaatcaagggcggctctggctctgacatccagctgacacagagcccttctagcctgtctgccagcgtgggcgacagagtgaccatcacatgtagagccagccagagcatcagctacctgaactggtatcagcagaagcccggcaagagccccaagcggtggatctacgatacaagcaagctggcctctggcgtgcccagcagattttctggctctggcagcggcaccgactacaccctgacaatcagcagcatgcagcctgaggatgccgccacctactactgccagcagtggtccagcaatcccctgacatttggcggaggcaccaaggtggaaatcaagcgtacggtggccgctcccagcgtgttcatcttcccacctagcgacgagcagctgaagtccggcacagcctctgtcgtgtgcctgctgaacaacttctacccccgcgaggccaaagtgcagtggaaggtggacaacgccctgcagagcggcaacagccaggaaagcgtgaccgagcaggacagcaaggactccacctacagcctgagcagcaccctgacactgagcaaggccgactacgagaagcacaaggtgtacgcctgcgaagtgacccaccagggcctgtctagccccgtgaccaagagcttcaaccggggcgagtgt

SEQ ID NO: 216 - protein, 328 aa, synthetic construct
  source 1..328: note = TgCD28cs_sshep12hOKT3L
DIQMTQSPSSLSASVGDRVTITCHASQNIYVWLNWYQQKPGKAPKLLIYKASNLHTGVPSRFSGSGSGTDFTLTISSLQPEDFATYYCQQGQTYPYTFGCGTKVEIKASTRKAGGDIQLTQSPSSLSASVGDRVTITCRASQSISYLNWYQQKPGKSPKRWIYDTSKLASGVPSRFSGSGSGTDYTLTISSMQPEDAATYYCQQWSSNPLTFGGGTKVEIKRTVAAPSVFIFPPSDEQLKSGTASVVCLLNNFYPREAKVQWKVDNALQSGNSQESVTEQDSKDSTYSLSSTLTLSKADYEKHKVYACEVTHQGLSSPVTKSFNRGEC

SEQ ID NO: 217 - DNA, 984 bp, synthetic construct
  source 1..984: mol_type = other DNA; note = TgCD28cs_sshep12hOKT3L
gacatccagatgacacagagccctagcagcctgtctgccagcgtgggagacagagtgaccatcacatgtcacgccagccagaacatctacgtgtggctgaactggtatcagcagaagcccggcaaggcccctaagctgctgatctacaaggccagcaatctgcacaccggcgtgcccagcagattttctggctctggcagcggcaccgacttcaccctgaccatatctagcctgcagcctgaggacttcgccacctactattgtcagcagggccagacatacccctacacctttggctgcggaacaaaggtggaaatcaaggccagcacacggaaggctggcggagacatccagctgacacagagcccttctagcctgtctgccagcgtgggcgacagagtgaccatcacatgtagagccagccagagcatcagctacctgaactggtatcagcagaagcccggcaagagccccaagcggtggatctacgatacaagcaagctggcctctggcgtgcccagcagattttctggctctggcagcggcaccgactacaccctgacaatcagcagcatgcagcctgaggatgccgccacctactactgccagcagtggtccagcaatcccctgacatttggcggaggcaccaaggtggaaatcaagcgtacggtggccgctcccagcgtgttcatcttcccacctagcgacgagcagctgaagtccggcacagcctctgtcgtgtgcctgctgaacaacttctacccccgcgaggccaaagtgcagtggaaggtggacaacgccctgcagagcggcaacagccaggaaagcgtgaccgagcaggacagcaaggactccacctacagcctgagcagcaccctgacactgagcaaggccgactacgagaagcacaaggtgtacgcctgcgaagtgacccaccagggcctgtctagccccgtgaccaagagcttcaaccggggcgagtgt

SEQ ID NO: 218 - protein, 327 aa, synthetic construct
  source 1..327: note = TgCD28cs_sshep13hOKT3L
DIQMTQSPSSLSASVGDRVTITCHASQNIYVWLNWYQQKPGKAPKLLIYKASNLHTGVPSRFSGSGSGTDFTLTISSLQPEDFATYYCQQGQTYPYTFGCGTKVEIKASTRKAGDIQLTQSPSSLSASVGDRVTITCRASQSISYLNWYQQKPGKSPKRWIYDTSKLASGVPSRFSGSGSGTDYTLTISSMQPEDAATYYCQQWSSNPLTFGGGTKVEIKRTVAAPSVFIFPPSDEQLKSGTASVVCLLNNFYPREAKVQWKVDNALQSGNSQESVTEQDSKDSTYSLSSTLTLSKADYEKHKVYACEVTHQGLSSPVTKSFNRGEC

SEQ ID NO: 219 - DNA, 981 bp, synthetic construct
  source 1..981: mol_type = other DNA; note = TgCD28cs_sshep13hOKT3L
gacatccagatgacacagagccctagcagcctgtctgccagcgtgggagacagagtgaccatcacatgtcacgccagccagaacatctacgtgtggctgaactggtatcagcagaagcccggcaaggcccctaagctgctgatctacaaggccagcaatctgcacaccggcgtgcccagcagattttctggctctggcagcggcaccgacttcaccctgaccatatctagcctgcagcctgaggacttcgccacctactattgtcagcagggccagacatacccctacacctttggctgcggaacaaaggtggaaatcaaggctagcacacggaaggctggcgacatccagctgacacagagcccttctagcctgtctgccagcgtgggcgacagagtgaccatcacatgtagagccagccagagcatcagctacctgaactggtatcagcagaagcccggcaagagccccaagcggtggatctacgatacaagcaagctggcctctggcgtgcccagcagattttctggctctggcagcggcaccgactacaccctgacaatcagcagcatgcagcctgaggatgccgccacctactactgccagcagtggtccagcaatcccctgacatttggcggaggcaccaaggtggaaatcaagcgtacggtggccgctcccagcgtgttcatcttcccacctagcgacgagcagctgaagtccggcacagcctctgtcgtgtgcctgctgaacaacttctacccccgcgaggccaaagtgcagtggaaggtggacaacgccctgcagagcggcaacagccaggaaagcgtgaccgagcaggacagcaaggactccacctacagcctgagcagcaccctgacactgagcaaggccgactacgagaagcacaaggtgtacgcctgcgaagtgacccaccagggcctgtctagccccgtgaccaagagcttcaaccggggcgagtgt

SEQ ID NO: 220 - protein, 327 aa, synthetic construct
  source 1..327: note = TgCD28cs_sshep13bhOKT3L
DIQMTQSPSSLSASVGDRVTITCHASQNIYVWLNWYQQKPGKAPKLLIYKASNLHTGVPSRFSGSGSGTDFTLTISSLQPEDFATYYCQQGQTYPYTFGCGTKVEIKSTRKAGGDIQLTQSPSSLSASVGDRVTITCRASQSISYLNWYQQKPGKSPKRWIYDTSKLASGVPSRFSGSGSGTDYTLTISSMQPEDAATYYCQQWSSNPLTFGGGTKVEIKRTVAAPSVFIFPPSDEQLKSGTASVVCLLNNFYPREAKVQWKVDNALQSGNSQESVTEQDSKDSTYSLSSTLTLSKADYEKHKVYACEVTHQGLSSPVTKSFNRGEC

SEQ ID NO: 221 - DNA, 981 bp, synthetic construct
  source 1..981: mol_type = other DNA; note = TgCD28cs_sshep13bhOKT3L
gacatccagatgacacagagccctagcagcctgtctgccagcgtgggagacagagtgaccatcacatgtcacgccagccagaacatctacgtgtggctgaactggtatcagcagaagcccggcaaggcccctaagctgctgatctacaaggccagcaatctgcacaccggcgtgcccagcagattttctggctctggcagcggcaccgacttcaccctgaccatatctagcctgcagcctgaggacttcgccacctactattgtcagcagggccagacatacccctacacctttggctgcggaacaaaggtggaaatcaagagcacgcgtaaggctggcggagacatccagctgacacagagcccttctagcctgtctgccagcgtgggcgacagagtgaccatcacatgtagagccagccagagcatcagctacctgaactggtatcagcagaagcccggcaagagccccaagcggtggatctacgatacaagcaagctggcctctggcgtgcccagcagattttctggctctggcagcggcaccgactacaccctgacaatcagcagcatgcagcctgaggatgccgccacctactactgccagcagtggtccagcaatcccctgacatttggcggaggcaccaaggtggaaatcaagcgtacggtggccgctcccagcgtgttcatcttcccacctagcgacgagcagctgaagtccggcacagcctctgtcgtgtgcctgctgaacaacttctacccccgcgaggccaaagtgcagtggaaggtggacaacgccctgcagagcggcaacagccaggaaagcgtgaccgagcaggacagcaaggactccacctacagcctgagcagcaccctgacactgagcaaggccgactacgagaagcacaaggtgtacgcctgcgaagtgacccaccagggcctgtctagccccgtgaccaagagcttcaaccggggcgagtgt

SEQ ID NO: 222 - protein, 576 aa, synthetic construct
  source 1..576: note = TgCD28cs_sscl5hOKT3HholeLALAPA
QVQLVQSGAEVKKPGASVKVSCKASGYTFTSYYIHWVRQAPGQCLEWIGSIYPGNVNTNYNEKFKDRATLTVDTSISTAYMELSRLRSDDTAVYFCTRSHYGLDWNFDVWGQGTTVTVSSASTRKAGGQVQLVQSGAEVAKPGASVKVSCKASGYTFTRYTMHWVKQAPGQGLEWIGYINPSRGYTNYAQKFQGKATLTTDKSTSTAYMELSSLRSEDTAVYYCARYYDDHYSLDYWGQGTTLTVSSASTKGPSVFPLAPSSKSTSGGTAALGCLVKDYFPEPVTVSWNSGALTSGVHTFPAVLQSSGLYSLSSVVTVPSSSLGTQTYICNVNHKPSNTKVDKKVEPKSCDKTHTCPPCPAPEAAGGPSVFLFPPKPKDTLMISRTPEVTCVVVDVSHEDPEVKFNWYVDGVEVHNAKTKPREEQYNSTYRVVSVLTVLHQDWLNGKEYKCKVSNKALAAPIEKTISKAKGQPREPQVCTLPPSRDELTKNQVSLSCAVKGFYPSDIAVEWESNGQPENNYKTTPPVLDSDGSFFLVSKLTVDKSRWQQGNVFSCSVMHEALHNHYTQKSLSLSPG

SEQ ID NO: 223 - DNA, 1728 bp, synthetic construct
  source 1..1728: mol_type = other DNA; note = TgCD28cs_sscl5hOKT3HholeLALAPA
caggttcagctggttcagtctggcgccgaagtgaagaaacctggcgcctctgtgaaggtgtcctgcaaggccagcggctacacctttaccagctactacatccactgggtccgacaggcccctggacaatgcctggaatggatcggcagcatctaccccggcaacgtgaacaccaactacaacgagaagttcaaggaccgggccacactgaccgtggacacctctatcagcaccgcctacatggaactgagccggctgagatccgatgataccgccgtgtacttctgcaccagaagccactacggcctggactggaacttcgatgtgtggggccagggcaccaccgtgacagtttcttctgccagcacacggaaggctggcggacaggttcagctggttcagtctggcgccgaagtggctaaacctggcgcctccgtgaaggtgtcctgtaaagccagcggctacacattcacccggtacaccatgcactgggtcaagcaggctccaggacagggactcgagtggatcggctacatcaaccccagcagaggctacaccaactacgcccagaagttccagggcaaagccacactgaccaccgacaagagcaccagcaccgcctacatggaactgagcagcctgagaagcgaggacaccgccgtgtactactgtgcccggtactacgacgaccactacagcctggattattggggccagggcacaaccctgaccgtgtcatctgcttcgaccaagggcccatccgtgtttcctctggctcccagcagcaagtctacaagcggaggaacagccgctctgggctgcctggtcaaggattactttcccgagcctgtgaccgtgtcctggaattctggcgctctgacaagcggcgtgcacacctttccagctgtgctgcaaagcagcggcctgtactctctgagcagcgtggtcacagtgcctagctctagcctgggcacccagacctacatctgcaatgtgaaccacaagcctagcaacaccaaggtggacaagaaggtggaacccaagagctgcgataagacccacacatgtcctccatgtcctgctccagaggctgctggtggcccttccgtgtttctgttccctccaaagcctaaggacaccctgatgatcagcaggacccctgaagtgacctgcgtggtggtggatgtgtctcacgaggacccagaagtgaagttcaattggtacgtggacggcgtggaagtgcacaacgccaagaccaagcctagagaggaacagtacaacagcacctacagagtggtgtccgtgctgaccgtgctgcaccaggattggctgaacggcaaagagtacaagtgcaaggtgtccaacaaggccctggccgctcctatcgagaaaaccatcagcaaggccaagggccagcctcgcgaacctcaagtctgtacactgcctcctagccgggacgagctgaccaagaatcaggtgtcactgagctgcgccgtgaagggcttttaccccagcgacattgccgtggaatgggagagcaatggccagccagagaacaactacaagacaacccctcctgtgctggacagcgacggctcatttttcctggtgtccaagctgacagtggacaagagcagatggcagcagggcaacgtgttcagctgcagcgtgatgcacgaggccctgcacaaccactacacccagaaaagcctgtctctgagccctggc

SEQ ID NO: 224 - protein, 575 aa, synthetic construct
  source 1..575: note = TgCD28cs_sscl8hOKT3HholeLALAPA
QVQLVQSGAEVKKPGASVKVSCKASGYTFTSYYIHWVRQAPGQCLEWIGSIYPGNVNTNYNEKFKDRATLTVDTSISTAYMELSRLRSDDTAVYFCTRSHYGLDWNFDVWGQGTTVTVSSASTRKAGQVQLVQSGAEVAKPGASVKVSCKASGYTFTRYTMHWVKQAPGQGLEWIGYINPSRGYTNYAQKFQGKATLTTDKSTSTAYMELSSLRSEDTAVYYCARYYDDHYSLDYWGQGTTLTVSSASTKGPSVFPLAPSSKSTSGGTAALGCLVKDYFPEPVTVSWNSGALTSGVHTFPAVLQSSGLYSLSSVVTVPSSSLGTQTYICNVNHKPSNTKVDKKVEPKSCDKTHTCPPCPAPEAAGGPSVFLFPPKPKDTLMISRTPEVTCVVVDVSHEDPEVKFNWYVDGVEVHNAKTKPREEQYNSTYRVVSVLTVLHQDWLNGKEYKCKVSNKALAAPIEKTISKAKGQPREPQVCTLPPSRDELTKNQVSLSCAVKGFYPSDIAVEWESNGQPENNYKTTPPVLDSDGSFFLVSKLTVDKSRWQQGNVFSCSVMHEALHNHYTQKSLSLSPG

SEQ ID NO: 225 - DNA, 975 bp, synthetic construct; identical to SEQ ID NO: 215
  source 1..975: mol_type = other DNA; note = TgCD28cs_ssGShOKT3L

SEQ ID NO: 226 - protein, 575 aa, synthetic construct
  source 1..575: note = TgCD28cs_sscl9hOKT3HholeLALAPA
QVQLVQSGAEVKKPGASVKVSCKASGYTFTSYYIHWVRQAPGQCLEWIGSIYPGNVNTNYNEKFKDRATLTVDTSISTAYMELSRLRSDDTAVYFCTRSHYGLDWNFDVWGQGTTVTVSSSTRKAGGQVQLVQSGAEVAKPGASVKVSCKASGYTFTRYTMHWVKQAPGQGLEWIGYINPSRGYTNYAQKFQGKATLTTDKSTSTAYMELSSLRSEDTAVYYCARYYDDHYSLDYWGQGTTLTVSSASTKGPSVFPLAPSSKSTSGGTAALGCLVKDYFPEPVTVSWNSGALTSGVHTFPAVLQSSGLYSLSSVVTVPSSSLGTQTYICNVNHKPSNTKVDKKVEPKSCDKTHTCPPCPAPEAAGGPSVFLFPPKPKDTLMISRTPEVTCVVVDVSHEDPEVKFNWYVDGVEVHNAKTKPREEQYNSTYRVVSVLTVLHQDWLNGKEYKCKVSNKALAAPIEKTISKAKGQPREPQVCTLPPSRDELTKNQVSLSCAVKGFYPSDIAVEWESNGQPENNYKTTPPVLDSDGSFFLVSKLTVDKSRWQQGNVFSCSVMHEALHNHYTQKSLSLSPG

SEQ ID NO: 227 - DNA, 1725 bp, synthetic construct
  source 1..1725: mol_type = other DNA; note = TgCD28cs_sscl9hOKT3HholeLALAPA
caggttcagctggttcagtctggcgccgaagtgaagaaacctggcgcctctgtgaaggtgtcctgcaaggccagcggctacacctttaccagctactacatccactgggtccgacaggcccctggacaatgcctggaatggatcggcagcatctaccccggcaacgtgaacaccaactacaacgagaagttcaaggaccgggccacactgaccgtggacacctctatcagcaccgcctacatggaactgagccggctgagatccgatgataccgccgtgtacttctgcaccagaagccactacggcctggactggaacttcgatgtgtggggccagggcaccaccgtgacagtttcttctagcacgcgtaaggctggcggacaggttcagctggttcagtctggcgccgaagtggctaaacctggcgcctccgtgaaggtgtcctgtaaagccagcggctacacattcacccggtacaccatgcactgggtcaagcaggctccaggacagggactcgagtggatcggctacatcaaccccagcagaggctacaccaactacgcccagaagttccagggcaaagccacactgaccaccgacaagagcaccagcaccgcctacatggaactgagcagcctgagaagcgaggacaccgccgtgtactactgtgcccggtactacgacgaccactacagcctggattattggggccagggcacaaccctgaccgtgtcatctgcttcgaccaagggcccatccgtgtttcctctggctcccagcagcaagtctacaagcggaggaacagccgctctgggctgcctggtcaaggattactttcccgagcctgtgaccgtgtcctggaattctggcgctctgacaagcggcgtgcacacctttccagctgtgctgcaaagcagcggcctgtactctctgagcagcgtggtcacagtgcctagctctagcctgggcacccagacctacatctgcaatgtgaaccacaagcctagcaacaccaaggtggacaagaaggtggaacccaagagctgcgataagacccacacatgtcctccatgtcctgctccagaggctgctggtggcccttccgtgtttctgttccctccaaagcctaaggacaccctgatgatcagcaggacccctgaagtgacctgcgtggtggtggatgtgtctcacgaggacccagaagtgaagttcaattggtacgtggacggcgtggaagtgcacaacgccaagaccaagcctagagaggaacagtacaacagcacctacagagtggtgtccgtgctgaccgtgctgcaccaggattggctgaacggcaaagagtacaagtgcaaggtgtccaacaaggccctggccgctcctatcgagaaaaccatcagcaaggccaagggccagcctcgcgaacctcaagtctgtacactgcctcctagccgggacgagctgaccaagaatcaggtgtcactgagctgcgccgtgaagggcttttaccccagcgacattgccgtggaatgggagagcaatggccagccagagaacaactacaagacaacccctcctgtgctggacagcgacggctcatttttcctggtgtccaagctgacagtggacaagagcagatggcagcagggcaacgtgttcagctgcagcgtgatgcacgaggccctgcacaaccactacacccagaaaagcctgtctctgagccctggc

SEQ ID NO: 228 - protein, 720 aa, synthetic construct
  source 1..720: note = Trop2_317TgCD28csL1knobLALAPA
EIVLTQSPATLSLSPGERATLSCRASQSVDSYGNSFLHWYQQKPGQAPRLLIYWASNRATGIPARFSGSGSGTDFTLTISSLEPEDFAVYYCQQNNEDLWTFGGGTKLEIKGGSSGDIQMTQSPSSLSASVGDRVTITCHASQNIYVWLNWYQQKPGKAPKLLIYKASNLHTGVPSRFSGSGSGTDFTLTISSLQPEDFATYYCQQGQTYPYTFGGGTKVEIKGGGGSGGSGSGGGGSASGSGQVQLVQSGAEVKKPGASVKVSCKASGYTFTSYYIHWVRQAPGQGLEWIGSIYPGNVNTNYNEKFKDRATLTVDTSISTAYMELSRLRSDDTAVYFCTRSHYGLDWNFDVWGQGTTVTVSSGGSSGEVQLVESGGGLVKPGGSLRLSCAASGFTFQNYAMSWVRQAPGKGLEWVSSISSDATYTYYADSVKGRFTISRDNAKNVLYLQMTSLRAEDTAVYYCARHPPSYYYAFDYWGQGTTLTVSSASGGSGDKTHTCPPCPAPEAAGGPSVFLFPPKPKDTLMISRTPEVTCVVVDVSHEDPEVKFNWYVDGVEVHNAKTKPREEQYNSTYRVVSVLTVLHQDWLNGKEYKCKVSNKALAAPIEKTISKAKGQPREPQVYTLPPCRDELTKNQVSLWCLVKGFYPSDIAVEWESNGQPENNYKTTPPVLDSDGSFFLYSKLTVDKSRWQQGNVFSCSVMHEALHNHYTQKSLSLSPG

SEQ ID NO: 229 - DNA, 2160 bp, synthetic construct
  source 1..2160: mol_type = other DNA; note = Trop2_317TgCD28csL1knobLALAPA
gagatcgtgctgacacagtctcccgccacactgtcactgtctccaggcgaaagagccacactgagctgtagagccagccagagcgtggacagctacggcaatagcttcctgcactggtatcagcagaagcccggacaggctcccagactgctgatctactgggccagcaatagagccacaggcatccccgccagattttctggctctggcagcggcaccgatttcaccctgaccataagcagcctggaacctgaggacttcgccgtgtactactgccagcagaacaacgaggacctgtggacctttggcggaggcaccaagctggaaatcaagggcggatcttctggagacatccagatgacacagagccctagcagcctgtctgccagcgtgggagacagagtgaccatcacatgtcacgccagccagaacatctacgtgtggctgaactggtatcagcagaagcccggcaaggcccctaagctgctgatctacaaggccagcaatctgcacaccggcgtgcccagcagattttctggctctggcagcggcaccgacttcaccctgaccatatctagcctgcagcctgaggacttcgccacctactattgtcagcagggccagacatacccctacacctttggcggcggaacaaaggtggaaatcaagggaggcggaggatctggcggatctggaagtggcggcggtggatctgcttctggctctggccaggttcagctggttcagtctggcgccgaagtgaagaaacctggcgcctctgtgaaggtgtcctgcaaggccagcggctacacctttaccagctactacatccactgggtccgacaggcccctggacaaggactggaatggatcggcagcatctaccccggcaacgtgaacaccaactacaacgagaagttcaaggaccgggccacactgaccgtggacacctctatcagcaccgcctacatggaactgagccggctgagatccgatgataccgccgtgtacttctgcaccagaagccactacggcctggactggaacttcgatgtgtggggccagggcaccaccgtgacagtttcttctggaggcagctctggcgaggtgcagctggttgaatctggcggcggacttgtgaagcctggcggatctctgagactgagctgtgccgccagcggcttcacattccagaactacgccatgagctgggtccgacaggcccctggaaaaggccttgaatgggtgtccagcatcagcagcgacgccacctacacctactacgccgatagcgtgaagggcagattcaccatcagccgggacaacgccaagaacgtgctgtacctgcagatgaccagcctgagagccgaggataccgccgtgtactactgcgccagacatcctcctagctactactatgccttcgactactggggccagggcaccacactgacagtctcttctgcttctggcggctccggagataagacccacacatgtcctccatgtcctgctccagaagctgctggcggcccttctgtgttcctgtttcctccaaagcctaaggacaccctgatgatcagcagaacccctgaagtgacctgcgtggtggtggatgtgtctcacgaggaccccgaagtgaagttcaattggtacgtggacggcgtggaagtgcacaacgccaagaccaagcctagagaggaacagtacaacagcacctacagagtggtgtccgtgctgaccgtgctgcaccaggattggctgaacggcaaagagtacaagtgcaaggtgtccaacaaggccctggccgctcctatcgagaaaaccatcagcaaggccaagggccagcctagggaaccccaggtttacacccttcctccatgccgggatgagctgaccaagaaccaggtgtccctgtggtgtctcgtgaagggcttctaccccagcgacattgccgtggaatgggagagcaatggccagcctgagaacaactacaagacaacccctcctgtgctggacagcgacggctcattcttcctgtacagcaagctgacagtcgacaagtccagatggcagcagggcaacgtgttcagttgcagcgtgatgcacgaggccctgcacaaccactacacccagaagtccctgagcctgtctcctgga

SEQ ID NO: 230 - protein, 572 aa, synthetic construct
  source 1..572: note = cMetGShOKT3HholeLALAPA
QVQLVQSGAEVVKPGASVKLSCKASGYTFTSYWLHWVRQAPGQGLEWVGMIDPSNSDTRFNPNFKDRVTITADTSTSTAYMELSSLRSEDTAVYYCATYKSYVSPLDYWGQGTSVTVSSGGSGSQVQLVQSGAEVAKPGASVKVSCKASGYTFTRYTMHWVKQAPGQGLEWIGYINPSRGYTNYAQKFQGKATLTTDKSTSTAYMELSSLRSEDTAVYYCARYYDDHYSLDYWGQGTTLTVSSASTKGPSVFPLAPSSKSTSGGTAALGCLVKDYFPEPVTVSWNSGALTSGVHTFPAVLQSSGLYSLSSVVTVPSSSLGTQTYICNVNHKPSNTKVDKKVEPKSCDKTHTCPPCPAPEAAGGPSVFLFPPKPKDTLMISRTPEVTCVVVDVSHEDPEVKFNWYVDGVEVHNAKTKPREEQYNSTYRVVSVLTVLHQDWLNGKEYKCKVSNKALAAPIEKTISKAKGQPREPQVCTLPPSRDELTKNQVSLSCAVKGFYPSDIAVEWESNGQPENNYKTTPPVLDSDGSFFLVSKLTVDKSRWQQGNVFSCSVMHEALHNHYTQKSLSLSPG

SEQ ID NO: 231 - DNA, 1716 bp, synthetic construct
  source 1..1716: mol_type = other DNA; note = cMetGShOKT3HholeLALAPA
caggttcagctggttcagtctggcgccgaggttgtgaaacctggcgcctctgtgaagctgagctgtaaagccagcggctacaccttcaccagctactggctgcactgggtccgacaggctccaggacaaggactggaatgggtcggaatgatcgaccccagcaacagcgacacccggttcaaccccaacttcaaggacagagtgaccatcaccgccgacaccagcacaagcaccgcctacatggaactgagcagcctgagaagcgaggacaccgccgtgtactactgcgccacctacaagagctacgtgtcccctctggattactggggccagggcacaagcgtgacagtgtcatctggcggctctggctctcaggttcagctggttcagtctggcgccgaagtggctaaacctggcgcctccgtgaaggtgtcctgtaaagccagcggctacacattcacccggtacaccatgcactgggtcaagcaggctccaggacaaggcttggagtggatcggctacatcaaccctagccggggctacaccaattacgcccagaagttccagggcaaggccacactgaccaccgacaagagcacaagcaccgcctacatggaactgagcagcctgagaagcgaggacaccgccgtgtactactgtgcccggtactacgacgaccactacagcctggattattggggccagggcacaaccctgaccgtgtcatctgcttcgaccaagggcccatccgtgtttcctctggctcccagcagcaagtctacaagcggaggaacagccgctctgggctgcctggtcaaggattactttcccgagcctgtgaccgtgtcctggaattctggcgctctgacaagcggcgtgcacacctttccagctgtgctgcaaagcagcggcctgtactctctgagcagcgtggtcacagtgcctagctctagcctgggcacccagacctacatctgcaatgtgaaccacaagcctagcaacaccaaggtggacaagaaggtggaacccaagagctgcgataagacccacacatgtcctccatgtcctgctccagaagctgctggcggcccttctgtgttcctgtttcctccaaagcctaaggacaccctgatgatcagcagaacccctgaagtgacctgcgtggtggtggatgtgtctcacgaggaccccgaagtgaagttcaattggtacgtggacggcgtggaagtgcacaacgccaagaccaagcctagagaggaacagtacaacagcacctacagagtggtgtccgtgctgaccgtgctgcaccaggattggctgaacggcaaagagtacaagtgcaaggtgtccaacaaggccctggccgctcctatcgagaaaaccatcagcaaggccaagggccagcctagggaaccccaggtttgtacccttcctccaagccgggatgagctgaccaagaaccaggtgtccctgagctgtgccgtgaagggcttctaccccagcgacattgccgtggaatgggagagcaatggccagcctgagaacaactacaagacaacccctcctgtgctggacagcgacggctcattcttcctggtgagcaagctgacagtcgacaagtccagatggcagcagggcaacgtgttcagttgcagcgtgatgcacgaggccctgcacaaccactacacccagaagtccctgagcctgtctcctgga

SEQ ID NO: 232 - protein, 331 aa, synthetic construct
  source 1..331: note = cMetGShOKT3L
DIVMTQSPDSLAVSLGERATINCKSSQSLLYTSSQKNYLAWYQQKPGQPPKLLIYWASTRESGVPDRFSGSGSGTDFTLTISSLQAEDVAVYYCQQYYAYPWTFGGGTKLEIKGGSGSDIQLTQSPSSLSASVGDRVTITCRASQSISYLNWYQQKPGKSPKRWIYDTSKLASGVPSRFSGSGSGTDYTLTISSMQPEDAATYYCQQWSSNPLTFGGGTKVEIKRTVAAPSVFIFPPSDEQLKSGTASVVCLLNNFYPREAKVQWKVDNALQSGNSQESVTEQDSKDSTYSLSSTLTLSKADYEKHKVYACEVTHQGLSSPVTKSFNRGEC

SEQ ID NO: 233 - DNA, 993 bp, synthetic construct
  source 1..993: mol_type = other DNA; note = cMetGShOKT3L
gacatcgtgatgacacagagccctgatagcctggccgtgtctctgggagagagagccaccatcaactgcaagagcagccagagcctgctgtacacctccagccagaagaactacctggcctggtatcagcagaagcccggccagcctcctaagctgctgatctactgggccagcaccagagaaagcggcgtgcccgatagattttctggctctggcagcggcaccgacttcaccctgacaatttctagcctgcaagccgaggacgtggccgtgtactactgccagcagtactacgcttacccctggacctttggcggaggcaccaagctggaaatcaagggcggctctggctctgacatccagctgacacagagcccttctagcctgtctgccagcgtgggcgacagagtgaccatcacatgtagagccagccagagcatcagctacctgaactggtatcagcagaagcccggcaagagccccaagcggtggatctacgatacaagcaagctggcctctggcgtgcccagcagattttctggctctggcagcggcaccgactacaccctgacaatcagcagcatgcagcctgaggatgccgccacctactactgccagcagtggtccagcaatcccctgacatttggcggaggcaccaaggtggaaatcaagcgtacggtggccgctcccagcgtgttcatcttcccacctagcgacgagcagctgaagtccggcacagcctctgtcgtgtgcctgctgaacaacttctacccccgcgaggccaaagtgcagtggaaggtggacaacgccctgcagagcggcaacagccaggaaagcgtgaccgagcaggacagcaaggactccacctacagcctgagcagcaccctgacactgagcaaggccgactacgagaagcacaaggtgtacgcctgcgaagtgacccaccagggcctgtctagccccgtgaccaagagcttcaaccggggcgagtgt

SEQ ID NO: 234 - protein, 575 aa, synthetic construct
  source 1..575: note = cMetCl7hOKT3HholeLALAPA
QVQLVQSGAEVVKPGASVKLSCKASGYTFTSYWLHWVRQAPGQGLEWVGMIDPSNSDTRFNPNFKDRVTITADTSTSTAYMELSSLRSEDTAVYYCATYKSYVSPLDYWGQGTSVTVSSGPAGLVSGQVQLVQSGAEVAKPGASVKVSCKASGYTFTRYTMHWVKQAPGQGLEWIGYINPSRGYTNYAQKFQGKATLTTDKSTSTAYMELSSLRSEDTAVYYCARYYDDHYSLDYWGQGTTLTVSSASTKGPSVFPLAPSSKSTSGGTAALGCLVKDYFPEPVTVSWNSGALTSGVHTFPAVLQSSGLYSLSSVVTVPSSSLGTQTYICNVNHKPSNTKVDKKVEPKSCDKTHTCPPCPAPEAAGGPSVFLFPPKPKDTLMISRTPEVTCVVVDVSHEDPEVKFNWYVDGVEVHNAKTKPREEQYNSTYRVVSVLTVLHQDWLNGKEYKCKVSNKALAAPIEKTISKAKGQPREPQVCTLPPSRDELTKNQVSLSCAVKGFYPSDIAVEWESNGQPENNYKTTPPVLDSDGSFFLVSKLTVDKSRWQQGNVFSCSVMHEALHNHYTQKSLSLSPG

SEQ ID NO: 235 - DNA, 1725 bp, synthetic construct
  source 1..1725: mol_type = other DNA; note = cMetCl7hOKT3HholeLALAPA
caggttcagctggttcagtctggcgccgaggttgtgaaacctggcgcctctgtgaagctgagctgtaaagccagcggctacaccttcaccagctactggctgcactgggtccgacaggctccaggacaaggactggaatgggtcggaatgatcgaccccagcaacagcgacacccggttcaaccccaacttcaaggacagagtgaccatcaccgccgacaccagcacaagcaccgcctacatggaactgagcagcctgagaagcgaggacaccgccgtgtactactgcgccacctacaagagctacgtgtcccctctggattactggggccagggcacaagcgtgacagtgtcatctggacctgctggacttgtcagcggacaggttcagctggttcagtctggcgccgaagtggctaaacctggcgcctccgtgaaggtgtcctgtaaagccagcggctacacattcacccggtacaccatgcactgggtcaagcaggctccaggacaaggcttggagtggatcggctacatcaaccctagccggggctacaccaattacgcccagaagttccagggcaaggccacactgaccaccgacaagagcacaagcaccgcctacatggaactgagcagcctgagaagcgaggacaccgccgtgtactactgtgcccggtactacgacgaccactacagcctggattattggggccagggcacaaccctgaccgtgtcatctgcttcgaccaagggcccatccgtgtttcctctggctcccagcagcaagtctacaagcggaggaacagccgctctgggctgcctggtcaaggattactttcccgagcctgtgaccgtgtcctggaattctggcgctctgacaagcggcgtgcacacctttccagctgtgctgcaaagcagcggcctgtactctctgagcagcgtggtcacagtgcctagctctagcctgggcacccagacctacatctgcaatgtgaaccacaagcctagcaacaccaaggtggacaagaaggtggaacccaagagctgcgataagacccacacatgtcctccatgtcctgctccagaagctgctggcggcccttctgtgttcctgtttcctccaaagcctaaggacaccctgatgatcagcagaacccctgaagtgacctgcgtggtggtggatgtgtctcacgaggaccccgaagtgaagttcaattggtacgtggacggcgtggaagtgcacaacgccaagaccaagcctagagaggaacagtacaacagcacctacagagtggtgtccgtgctgaccgtgctgcaccaggattggctgaacggcaaagagtacaagtgcaaggtgtccaacaaggccctggccgctcctatcgagaaaaccatcagcaaggccaagggccagcctagggaaccccaggtttgtacccttcctccaagccgggatgagctgaccaagaaccaggtgtccctgagctgtgccgtgaagggcttctaccccagcgacattgccgtggaatgggagagcaatggccagcctgagaacaactacaagacaacccctcctgtgctggacagcgacggctcattcttcctggtgagcaagctgacagtcgacaagtccagatggcagcagggcaacgtgttcagttgcagcgtgatgcacgaggccctgcacaaccactacacccagaagtccctgagcctgtctcctgga

SEQ ID NO: 236 - protein, 334 aa, synthetic construct
  source 1..334: note = cMetCl7hOKT3L
DIVMTQSPDSLAVSLGERATINCKSSQSLLYTSSQKNYLAWYQQKPGQPPKLLIYWASTRESGVPDRFSGSGSGTDFTLTISSLQAEDVAVYYCQQYYAYPWTFGGGTKLEIKGPAGLVSGDIQLTQSPSSLSASVGDRVTITCRASQSISYLNWYQQKPGKSPKRWIYDTSKLASGVPSRFSGSGSGTDYTLTISSMQPEDAATYYCQQWSSNPLTFGGGTKVEIKRTVAAPSVFIFPPSDEQLKSGTASVVCLLNNFYPREAKVQWKVDNALQSGNSQESVTEQDSKDSTYSLSSTLTLSKADYEKHKVYACEVTHQGLSSPVTKSFNRGEC

SEQ ID NO: 237 - DNA, 1002 bp, synthetic construct
  source 1..1002: mol_type = other DNA; note = cMetCl7hOKT3L
gacatcgtgatgacacagagccctgatagcctggccgtgtctctgggagagagagccaccatcaactgcaagagcagccagagcctgctgtacacctccagccagaagaactacctggcctggtatcagcagaagcccggccagcctcctaagctgctgatctactgggccagcaccagagaaagcggcgtgcccgatagattttctggctctggcagcggcaccgacttcaccctgacaatttctagcctgcaagccgaggacgtggccgtgtactactgccagcagtactacgcttacccctggacctttggcggaggcaccaagctggaaatcaagggacctgctggacttgtcagcggagacatccagctgacacagagcccttctagcctgtctgccagcgtgggcgacagagtgaccatcacatgtagagccagccagagcatcagctacctgaactggtatcagcagaagcccggcaagagccccaagcggtggatctacgatacaagcaagctggcctctggcgtgcccagcagattttctggctctggcagcggcaccgactacaccctgacaatcagcagcatgcagcctgaggatgccgccacctactactgccagcagtggtccagcaatcccctgacatttggcggaggcaccaaggtggaaatcaagcgtacggtggccgctcccagcgtgttcatcttcccacctagcgacgagcagctgaagtccggcacagcctctgtcgtgtgcctgctgaacaacttctacccccgcgaggccaaagtgcagtggaaggtggacaacgccctgcagagcggcaacagccaggaaagcgtgaccgagcaggacagcaaggactccacctacagcctgagcagcaccctgacactgagcaaggccgactacgagaagcacaaggtgtacgcctgcgaagtgacccaccagggcctgtctagccccgtgaccaagagcttcaaccggggcgagtgt

SEQ ID NO: 238 - protein, 575 aa, synthetic construct
  source 1..575: note = cMetcl5hOKT3HholeLALAPA
QVQLVQSGAEVVKPGASVKLSCKASGYTFTSYWLHWVRQAPGQGLEWVGMIDPSNSDTRFNPNFKDRVTITADTSTSTAYMELSSLRSEDTAVYYCATYKSYVSPLDYWGQGTSVTVSSASTRKAGGQVQLVQSGAEVAKPGASVKVSCKASGYTFTRYTMHWVKQAPGQGLEWIGYINPSRGYTNYAQKFQGKATLTTDKSTSTAYMELSSLRSEDTAVYYCARYYDDHYSLDYWGQGTTLTVSSASTKGPSVFPLAPSSKSTSGGTAALGCLVKDYFPEPVTVSWNSGALTSGVHTFPAVLQSSGLYSLSSVVTVPSSSLGTQTYICNVNHKPSNTKVDKKVEPKSCDKTHTCPPCPAPEAAGGPSVFLFPPKPKDTLMISRTPEVTCVVVDVSHEDPEVKFNWYVDGVEVHNAKTKPREEQYNSTYRVVSVLTVLHQDWLNGKEYKCKVSNKALAAPIEKTISKAKGQPREPQVCTLPPSRDELTKNQVSLSCAVKGFYPSDIAVEWESNGQPENNYKTTPPVLDSDGSFFLVSKLTVDKSRWQQGNVFSCSVMHEALHNHYTQKSLSLSPG

SEQ ID NO: 239 - DNA, 1725 bp, synthetic construct
  source 1..1725: mol_type = other DNA; note = cMetcl5hOKT3HholeLALAPA
caggttcagctggttcagtctggcgccgaggttgtgaaacctggcgcctctgtgaagctgagctgtaaagccagcggctacaccttcaccagctactggctgcactgggtccgacaggctccaggacaaggactggaatgggtcggaatgatcgaccccagcaacagcgacacccggttcaaccccaacttcaaggacagagtgaccatcaccgccgacaccagcacaagcaccgcctacatggaactgagcagcctgagaagcgaggacaccgccgtgtactactgcgccacctacaagagctacgtgtcccctctggattactggggccagggcacaagcgtgacagtgtcatctgccagcacacggaaggctggcggacaggttcagctggttcagtctggcgccgaagtggctaaacctggcgcctccgtgaaggtgtcctgtaaagccagcggctacacattcacccggtacaccatgcactgggtcaagcaggctccaggacaaggcttggagtggatcggctacatcaaccctagccggggctacaccaattacgcccagaagttccagggcaaggccacactgaccaccgacaagagcacaagcaccgcctacatggaactgagcagcctgagaagcgaggacaccgccgtgtactactgtgcccggtactacgacgaccactacagcctggattattggggccagggcacaaccctgaccgtgtcatctgcttcgaccaagggcccatccgtgtttcctctggctcccagcagcaagtctacaagcggaggaacagccgctctgggctgcctggtcaaggattactttcccgagcctgtgaccgtgtcctggaattctggcgctctgacaagcggcgtgcacacctttccagctgtgctgcaaagcagcggcctgtactctctgagcagcgtggtcacagtgcctagctctagcctgggcacccagacctacatctgcaatgtgaaccacaagcctagcaacaccaaggtggacaagaaggtggaacccaagagctgcgataagacccacacatgtcctccatgtcctgctccagaagctgctggcggcccttctgtgttcctgtttcctccaaagcctaaggacaccctgatgatcagcagaacccctgaagtgacctgcgtggtggtggatgtgtctcacgaggaccccgaagtgaagttcaattggtacgtggacggcgtggaagtgcacaacgccaagaccaagcctagagaggaacagtacaacagcacctacagagtggtgtccgtgctgaccgtgctgcaccaggattggctgaacggcaaagagtacaagtgcaaggtgtccaacaaggccctggccgctcctatcgagaaaaccatcagcaaggccaagggccagcctagggaaccccaggtttgtacccttcctccaagccgggatgagctgaccaagaaccaggtgtccctgagctgtgccgtgaagggcttctaccccagcgacattgccgtggaatgggagagcaatggccagcctgagaacaactacaagacaacccctcctgtgctggacagcgacggctcattcttcctggtgagcaagctgacagtcgacaagtccagatggcagcagggcaacgtgttcagttgcagcgtgatgcacgaggccctgcacaaccactacacccagaagtccctgagcctgtctcctgga

SEQ ID NO: 240 - protein, 574 aa, synthetic construct
  source 1..574: note = cMetcl8hOKT3HholeLALAPA
QVQLVQSGAEVVKPGASVKLSCKASGYTFTSYWLHWVRQAPGQGLEWVGMIDPSNSDTRFNPNFKDRVTITADTSTSTAYMELSSLRSEDTAVYYCATYKSYVSPLDYWGQGTSVTVSSASTRKAGQVQLVQSGAEVAKPGASVKVSCKASGYTFTRYTMHWVKQAPGQGLEWIGYINPSRGYTNYAQKFQGKATLTTDKSTSTAYMELSSLRSEDTAVYYCARYYDDHYSLDYWGQGTTLTVSSASTKGPSVFPLAPSSKSTSGGTAALGCLVKDYFPEPVTVSWNSGALTSGVHTFPAVLQSSGLYSLSSVVTVPSSSLGTQTYICNVNHKPSNTKVDKKVEPKSCDKTHTCPPCPAPEAAGGPSVFLFPPKPKDTLMISRTPEVTCVVVDVSHEDPEVKFNWYVDGVEVHNAKTKPREEQYNSTYRVVSVLTVLHQDWLNGKEYKCKVSNKALAAPIEKTISKAKGQPREPQVCTLPPSRDELTKNQVSLSCAVKGFYPSDIAVEWESNGQPENNYKTTPPVLDSDGSFFLVSKLTVDKSRWQQGNVFSCSVMHEALHNHYTQKSLSLSPG

SEQ ID NO: 241 - DNA, 1722 bp, synthetic construct
  source 1..1722: mol_type = other DNA; note = cMetcl8hOKT3HholeLALAPA
caggttcagctggttcagtctggcgccgaggttgtgaaacctggcgcctctgtgaagctgagctgtaaagccagcggctacaccttcaccagctactggctgcactgggtccgacaggctccaggacaaggactggaatgggtcggaatgatcgaccccagcaacagcgacacccggttcaaccccaacttcaaggacagagtgaccatcaccgccgacaccagcacaagcaccgcctacatggaactgagcagcctgagaagcgaggacaccgccgtgtactactgcgccacctacaagagctacgtgtcccctctggattactggggccagggcacaagcgtgacagtgtcatctgctagcacacggaaggctggccaggttcagctggttcagtctggcgccgaagtggctaaacctggcgcctccgtgaaggtgtcctgtaaagccagcggctacacattcacccggtacaccatgcactgggtcaagcaggctccaggacaaggcttggagtggatcggctacatcaaccctagccggggctacaccaattacgcccagaagttccagggcaaggccacactgaccaccgacaagagcacaagcaccgcctacatggaactgagcagcctgagaagcgaggacaccgccgtgtactactgtgcccggtactacgacgaccactacagcctggattattggggccagggcacaaccctgaccgtgtcatctgcttcgaccaagggcccatccgtgtttcctctggctcccagcagcaagtctacaagcggaggaacagccgctctgggctgcctggtcaaggattactttcccgagcctgtgaccgtgtcctggaattctggcgctctgacaagcggcgtgcacacctttccagctgtgctgcaaagcagcggcctgtactctctgagcagcgtggtcacagtgcctagctctagcctgggcacccagacctacatctgcaatgtgaaccacaagcctagcaacaccaaggtggacaagaaggtggaacccaagagctgcgataagacccacacatgtcctccatgtcctgctccagaagctgctggcggcccttctgtgttcctgtttcctccaaagcctaaggacaccctgatgatcagcagaacccctgaagtgacctgcgtggtggtggatgtgtctcacgaggaccccgaagtgaagttcaattggtacgtggacggcgtggaagtgcacaacgccaagaccaagcctagagaggaacagtacaacagcacctacagagtggtgtccgtgctgaccgtgctgcaccaggattggctgaacggcaaagagtacaagtgcaaggtgtccaacaaggccctggccgctcctatcgagaaaaccatcagcaaggccaagggccagcctagggaaccccaggtttgtacccttcctccaagccgggatgagctgaccaagaaccaggtgtccctgagctgtgccgtgaagggcttctaccccagcgacattgccgtggaatgggagagcaatggccagcctgagaacaactacaagacaacccctcctgtgctggacagcgacggctcattcttcctggtgagcaagctgacagtcgacaagtccagatggcagcagggcaacgtgttcagttgcagcgtgatgcacgaggccctgcacaaccactacacccagaagtccctgagcctgtctcctgga

SEQ ID NO: 242 - protein, 574 aa, synthetic construct
  source 1..574: note = cMetcl9hOKT3HholeLALAPA
QVQLVQSGAEVVKPGASVKLSCKASGYTFTSYWLHWVRQAPGQGLEWVGMIDPSNSDTRFNPNFKDRVTITADTSTSTAYMELSSLRSEDTAVYYCATYKSYVSPLDYWGQGTSVTVSSSTRKAGGQVQLVQSGAEVAKPGASVKVSCKASGYTFTRYTMHWVKQAPGQGLEWIGYINPSRGYTNYAQKFQGKATLTTDKSTSTAYMELSSLRSEDTAVYYCARYYDDHYSLDYWGQGTTLTVSSASTKGPSVFPLAPSSKSTSGGTAALGCLVKDYFPEPVTVSWNSGALTSGVHTFPAVLQSSGLYSLSSVVTVPSSSLGTQTYICNVNHKPSNTKVDKKVEPKSCDKTHTCPPCPAPEAAGGPSVFLFPPKPKDTLMISRTPEVTCVVVDVSHEDPEVKFNWYVDGVEVHNAKTKPREEQYNSTYRVVSVLTVLHQDWLNGKEYKCKVSNKALAAPIEKTISKAKGQPREPQVCTLPPSRDELTKNQVSLSCAVKGFYPSDIAVEWESNGQPENNYKTTPPVLDSDGSFFLVSKLTVDKSRWQQGNVFSCSVMHEALHNHYTQKSLSLSPG

SEQ ID NO: 243 - DNA, 1722 bp, synthetic construct
  source 1..1722: mol_type = other DNA; note = cMetcl9hOKT3HholeLALAPA
caggttcagctggttcagtctggcgccgaggttgtgaaacctggcgcctctgtgaagctgagctgtaaagccagcggctacaccttcaccagctactggctgcactgggtccgacaggctccaggacaaggactggaatgggtcggaatgatcgaccccagcaacagcgacacccggttcaaccccaacttcaaggacagagtgaccatcaccgccgacaccagcacaagcaccgcctacatggaactgagcagcctgagaagcgaggacaccgccgtgtactactgcgccacctacaagagctacgtgtcccctctggattactggggccagggcacaagcgtgacagtgtcatctagcacgcgtaaggctggcggacaggttcagctggttcagtctggcgccgaagtggctaaacctggcgcctccgtgaaggtgtcctgtaaagccagcggctacacattcacccggtacaccatgcactgggtcaagcaggctccaggacaaggcttggagtggatcggctacatcaaccctagccggggctacaccaattacgcccagaagttccagggcaaggccacactgaccaccgacaagagcacaagcaccgcctacatggaactgagcagcctgagaagcgaggacaccgccgtgtactactgtgcccggtactacgacgaccactacagcctggattattggggccagggcacaaccctgaccgtgtcatctgcttcgaccaagggcccatccgtgtttcctctggctcccagcagcaagtctacaagcggaggaacagccgctctgggctgcctggtcaaggattactttcccgagcctgtgaccgtgtcctggaattctggcgctctgacaagcggcgtgcacacctttccagctgtgctgcaaagcagcggcctgtactctctgagcagcgtggtcacagtgcctagctctagcctgggcacccagacctacatctgcaatgtgaaccacaagcctagcaacaccaaggtggacaagaaggtggaacccaagagctgcgataagacccacacatgtcctccatgtcctgctccagaagctgctggcggcccttctgtgttcctgtttcctccaaagcctaaggacaccctgatgatcagcagaacccctgaagtgacctgcgtggtggtggatgtgtctcacgaggaccccgaagtgaagttcaattggtacgtggacggcgtggaagtgcacaacgccaagaccaagcctagagaggaacagtacaacagcacctacagagtggtgtccgtgctgaccgtgctgcaccaggattggctgaacggcaaagagtacaagtgcaaggtgtccaacaaggccctggccgctcctatcgagaaaaccatcagcaaggccaagggccagcctagggaaccccaggtttgtacccttcctccaagccgggatgagctgaccaagaaccaggtgtccctgagctgtgccgtgaagggcttctaccccagcgacattgccgtggaatgggagagcaatggccagcctgagaacaactacaagacaacccctcctgtgctggacagcgacggctcattcttcctggtgagcaagctgacagtcgacaagtccagatggcagcagggcaacgtgttcagttgcagcgtgatgcacgaggccctgcacaaccactacacccagaagtccctgagcctgtctcctgga

SEQ ID NO: 244 - protein, 334 aa, synthetic construct
  source 1..334: note = cMetcl5hOKT3L
DIVMTQSPDSLAVSLGERATINCKSSQSLLYTSSQKNYLAWYQQKPGQPPKLLIYWASTRESGVPDRFSGSGSGTDFTLTISSLQAEDVAVYYCQQYYAYPWTFGGGTKLEIKASTRKAGGDIQLTQSPSSLSASVGDRVTITCRASQSISYLNWYQQKPGKSPKRWIYDTSKLASGVPSRFSGSGSGTDYTLTISSMQPEDAATYYCQQWSSNPLTFGGGTKVEIKRTVAAPSVFIFPPSDEQLKSGTASVVCLLNNFYPREAKVQWKVDNALQSGNSQESVTEQDSKDSTYSLSSTLTLSKADYEKHKVYACEVTHQGLSSPVTKSFNRGEC

SEQ ID NO: 245 - DNA, 1002 bp, synthetic construct
  source 1..1002: mol_type = other DNA; note = cMetcl5hOKT3L
gacatcgtgatgacacagagccctgatagcctggccgtgtctctgggagagagagccaccatcaactgcaagagcagccagagcctgctgtacacctccagccagaagaactacctggcctggtatcagcagaagcccggccagcctcctaagctgctgatctactgggccagcaccagagaaagcggcgtgcccgatagattttctggctctggcagcggcaccgacttcaccctgacaatttctagcctgcaagccgaggacgtggccgtgtactactgccagcagtactacgcttacccctggacctttggcggaggcaccaagctggaaatcaaggccagcacacggaaggctggcggagacatccagctgacacagagcccttctagcctgtctgccagcgtgggcgacagagtgaccatcacatgtagagccagccagagcatcagctacctgaactggtatcagcagaagcccggcaagagccccaagcggtggatctacgatacaagcaagctggcctctggcgtgcccagcagattttctggctctggcagcggcaccgactacaccctgacaatcagcagcatgcagcctgaggatgccgccacctactactgccagcagtggtccagcaatcccctgacatttggcggaggcaccaaggtggaaatcaagcgtacggtggccgctcccagcgtgttcatcttcccacctagcgacgagcagctgaagtccggcacagcctctgtcgtgtgcctgctgaacaacttctacccccgcgaggccaaagtgcagtggaaggtggacaacgccctgcagagcggcaacagccaggaaagcgtgaccgagcaggacagcaaggactccacctacagcctgagcagcaccctgacactgagcaaggccgactacgagaagcacaaggtgtacgcctgcgaagtgacccaccagggcctgtctagccccgtgaccaagagcttcaaccggggcgagtgt

SEQ ID NO: 246 - protein, 333 aa, synthetic construct
  source 1..333: note = cMetcl8hOKT3L
DIVMTQSPDSLAVSLGERATINCKSSQSLLYTSSQKNYLAWYQQKPGQPPKLLIYWASTRESGVPDRFSGSGSGTDFTLTISSLQAEDVAVYYCQQYYAYPWTFGGGTKLEIKASTRKAGDIQLTQSPSSLSASVGDRVTITCRASQSISYLNWYQQKPGKSPKRWIYDTSKLASGVPSRFSGSGSGTDYTLTISSMQPEDAATYYCQQWSSNPLTFGGGTKVEIKRTVAAPSVFIFPPSDEQLKSGTASVVCLLNNFYPREAKVQWKVDNALQSGNSQESVTEQDSKDSTYSLSSTLTLSKADYEKHKVYACEVTHQGLSSPVTKSFNRGEC

SEQ ID NO: 247 - DNA, 999 bp, synthetic construct
  source 1..999: mol_type = other DNA; note = cMetcl8hOKT3L
gacatcgtgatgacacagagccctgatagcctggccgtgtctctgggagagagagccaccatcaactgcaagagcagccagagcctgctgtacacctccagccagaagaactacctggcctggtatcagcagaagcccggccagcctcctaagctgctgatctactgggccagcaccagagaaagcggcgtgcccgatagattttctggctctggcagcggcaccgacttcaccctgacaatttctagcctgcaagccgaggacgtggccgtgtactactgccagcagtactacgcttacccctggacctttggcggaggcaccaagctggaaatcaaggctagcacacggaaggctggcgacatccagctgacacagagcccttctagcctgtctgccagcgtgggcgacagagtgaccatcacatgtagagccagccagagcatcagctacctgaactggtatcagcagaagcccggcaagagccccaagcggtggatctacgatacaagcaagctggcctctggcgtgcccagcagattttctggctctggcagcggcaccgactacaccctgacaatcagcagcatgcagcctgaggatgccgccacctactactgccagcagtggtccagcaatcccctgacatttggcggaggcaccaaggtggaaatcaagcgtacggtggccgctcccagcgtgttcatcttcccacctagcgacgagcagctgaagtccggcacagcctctgtcgtgtgcctgctgaacaacttctacccccgcgaggccaaagtgcagtggaaggtggacaacgccctgcagagcggcaacagccaggaaagcgtgaccgagcaggacagcaaggactccacctacagcctgagcagcaccctgacactgagcaaggccgactacgagaagcacaaggtgtacgcctgcgaagtgacccaccagggcctgtctagccccgtgaccaagagcttcaaccggggcgagtgt

SEQ ID NO: 248 - protein, 333 aa, synthetic construct
  source 1..333: note = cMetcl9hOKT3L
DIVMTQSPDSLAVSLGERATINCKSSQSLLYTSSQKNYLAWYQQKPGQPPKLLIYWASTRESGVPDRFSGSGSGTDFTLTISSLQAEDVAVYYCQQYYAYPWTFGGGTKLEIKSTRKAGGDIQLTQSPSSLSASVGDRVTITCRASQSISYLNWYQQKPGKSPKRWIYDTSKLASGVPSRFSGSGSGTDYTLTISSMQPEDAATYYCQQWSSNPLTFGGGTKVEIKRTVAAPSVFIFPPSDEQLKSGTASVVCLLNNFYPREAKVQWKVDNALQSGNSQESVTEQDSKDSTYSLSSTLTLSKADYEKHKVYACEVTHQGLSSPVTKSFNRGEC

SEQ ID NO: 249 - DNA, 999 bp, synthetic construct
  source 1..999: mol_type = other DNA; note = cMetcl9hOKT3L
gacatcgtgatgacacagagccctgatagcctggccgtgtctctgggagagagagccaccatcaactgcaagagcagccagagcctgctgtacacctccagccagaagaactacctggcctggtatcagcagaagcccggccagcctcctaagctgctgatctactgggccagcaccagagaaagcggcgtgcccgatagattttctggctctggcagcggcaccgacttcaccctgacaatttctagcctgcaagccgaggacgtggccgtgtactactgccagcagtactacgcttacccctggacctttggcggaggcaccaagctggaaatcaagagcacgcgtaaggctggcggagacatccagctgacacagagcccttctagcctgtctgccagcgtgggcgacagagtgaccatcacatgtagagccagccagagcatcagctacctgaactggtatcagcagaagcccggcaagagccccaagcggtggatctacgatacaagcaagctggcctctggcgtgcccagcagattttctggctctggcagcggcaccgactacaccctgacaatcagcagcatgcagcctgaggatgccgccacctactactgccagcagtggtccagcaatcccctgacatttggcggaggcaccaaggtggaaatcaagcgtacggtggccgctcccagcgtgttcatcttcccacctagcgacgagcagctgaagtccggcacagcctctgtcgtgtgcctgctgaacaacttctacccccgcgaggccaaagtgcagtggaaggtggacaacgccctgcagagcggcaacagccaggaaagcgtgaccgagcaggacagcaaggactccacctacagcctgagcagcaccctgacactgagcaaggccgactacgagaagcacaaggtgtacgcctgcgaagtgacccaccagggcctgtctagccccgtgaccaagagcttcaaccggggcgagtgt

SEQ ID NO: 250 - protein, 721 aa, synthetic construct
  source 1..721: note = cMetTgCD28csL1knobLALAPA
DIVMTQSPDSLAVSLGERATINCKSSQSLLYTSSQKNYLAWYQQKPGQPPKLLIYWASTRESGVPDRFSGSGSGTDFTLTISSLQAEDVAVYYCQQYYAYPWTFGGGTKLEIKGGSSGDIQMTQSPSSLSASVGDRVTITCHASQNIYVWLNWYQQKPGKAPKLLIYKASNLHTGVPSRFSGSGSGTDFTLTISSLQPEDFATYYCQQGQTYPYTFGGGTKVEIKGGGGSGGSGSGGGGSASGSGQVQLVQSGAEVKKPGASVKVSCKASGYTFTSYYIHWVRQAPGQGLEWIGSIYPGNVNTNYNEKFKDRATLTVDTSISTAYMELSRLRSDDTAVYFCTRSHYGLDWNFDVWGQGTTVTVSSGGSSGQVQLVQSGAEVVKPGASVKLSCKASGYTFTSYWLHWVRQAPGQGLEWVGMIDPSNSDTRFNPNFKDRVTITADTSTSTAYMELSSLRSEDTAVYYCATYKSYVSPLDYWGQGTSVTVSSASGGSGDKTHTCPPCPAPEAAGGPSVFLFPPKPKDTLMISRTPEVTCVVVDVSHEDPEVKFNWYVDGVEVHNAKTKPREEQYNSTYRVVSVLTVLHQDWLNGKEYKCKVSNKALAAPIEKTISKAKGQPREPQVYTLPPCRDELTKNQVSLWCLVKGFYPSDIAVEWESNGQPENNYKTTPPVLDSDGSFFLYSKLTVDKSRWQQGNVFSCSVMHEALHNHYTQKSLSLSPG

SEQ ID NO: 251 - DNA, 2163 bp, synthetic construct
  source 1..2163: mol_type = other DNA; note = cMetTgCD28csL1knobLALAPA
gacatcgtgatgacacagagccctgatagcctggccgtgtctctgggagagagagccaccatcaactgcaagagcagccagagcctgctgtacacctccagccagaagaactacctggcctggtatcagcagaagcccggccagcctcctaagctgctgatctactgggccagcaccagagaaagcggcgtgcccgatagattttctggctctggcagcggcaccgacttcaccctgacaatttctagcctgcaagccgaggacgtggccgtgtactactgccagcagtactacgcttacccctggacctttggcggaggcaccaagctggaaatcaagggcggatcttctggagacatccagatgacacagagccctagcagcctgtctgccagcgtgggagacagagtgaccatcacatgtcacgccagccagaacatctacgtgtggctgaactggtatcagcagaagcccggcaaggcccctaagctgctgatctacaaggccagcaatctgcacaccggcgtgcccagcagattttctggctctggcagcggcaccgacttcaccctgaccatatctagcctgcagcctgaggacttcgccacctactattgtcagcagggccagacatacccctacacctttggcggcggaacaaaggtggaaatcaagggaggcggaggatctggcggatctggaagtggcggcggtggatctgcttctggctctggccaggttcagctggttcagtctggcgccgaagtgaagaaacctggcgcctctgtgaaggtgtcctgcaaggccagcggctacacctttaccagctactacatccactgggtccgacaggcccctggacaaggactggaatggatcggcagcatctaccccggcaacgtgaacaccaactacaacgagaagttcaaggaccgggccacactgaccgtggacacctctatcagcaccgcctacatggaactgagccggctgagatccgatgataccgccgtgtacttctgcaccagaagccactacggcctggactggaacttcgatgtgtggggccagggcaccaccgtgacagtttcttctggaggcagctctggccaggttcagctggttcagtctggcgccgaggttgtgaaacctggcgcctctgtgaagctgagctgtaaagccagcggctacaccttcaccagctactggctgcactgggtccgacaggctccaggacaaggactggaatgggtcggaatgatcgaccccagcaacagcgacacccggttcaaccccaacttcaaggacagagtgaccatcaccgccgacaccagcacaagcaccgcctacatggaactgagcagcctgagaagcgaggacaccgccgtgtactactgcgccacctacaagagctacgtgtcccctctggattactggggccagggcacaagcgtgacagtgtcatctgcttctggcggctccggagataagacccacacatgtcctccatgtcctgctccagaagctgctggcggcccttctgtgttcctgtttcctccaaagcctaaggacaccctgatgatcagcagaacccctgaagtgacctgcgtggtggtggatgtgtctcacgaggaccccgaagtgaagttcaattggtacgtggacggcgtggaagtgcacaacgccaagaccaagcctagagaggaacagtacaacagcacctacagagtggtgtccgtgctgaccgtgctgcaccaggattggctgaacggcaaagagtacaagtgcaaggtgtccaacaaggccctggccgctcctatcgagaaaaccatcagcaaggccaagggccagcctagggaaccccaggtttacacccttcctccatgccgggatgagctgaccaagaaccaggtgtccctgtggtgtctcgtgaagggcttctaccccagcgacattgccgtggaatgggagagcaatggccagcctgagaacaactacaagacaacccctcctgtgctggacagcgacggctcattcttcctgtacagcaagctgacagtcgacaagtccagatggcagcagggcaacgtgttcagttgcagcgtgatgcacgaggccctgcacaaccactacacccagaagtccctgagcctgtctcctgga

SEQ ID NO: 252 - protein, 573 aa, synthetic construct
  source 1..573: note = Trop2_317GShOKT3HholeLALAPA
EVQLVESGGGLVKPGGSLRLSCAASGFTFQNYAMSWVRQAPGKGLEWVSSISSDATYTYYADSVKGRFTISRDNAKNVLYLQMTSLRAEDTAVYYCARHPPSYYYAFDYWGQGTTLTVSSGGSGSQVQLVQSGAEVAKPGASVKVSCKASGYTFTRYTMHWVKQAPGQGLEWIGYINPSRGYTNYAQKFQGKATLTTDKSTSTAYMELSSLRSEDTAVYYCARYYDDHYSLDYWGQGTTLTVSSASTKGPSVFPLAPSSKSTSGGTAALGCLVKDYFPEPVTVSWNSGALTSGVHTFPAVLQSSGLYSLSSVVTVPSSSLGTQTYICNVNHKPSNTKVDKKVEPKSCDKTHTCPPCPAPEAAGGPSVFLFPPKPKDTLMISRTPEVTCVVVDVSHEDPEVKFNWYVDGVEVHNAKTKPREEQYNSTYRVVSVLTVLHQDWLNGKEYKCKVSNKALAAPIEKTISKAKGQPREPQVCTLPPSRDELTKNQVSLSCAVKGFYPSDIAVEWESNGQPENNYKTTPPVLDSDGSFFLVSKLTVDKSRWQQGNVFSCSVMHEALHNHYTQKSLSLSPG

SEQ ID NO: 253 - DNA, 1719 bp, synthetic construct
  source 1..1719: mol_type = other DNA; note = Trop2_317GShOKT3HholeLALAPA
gaggtgcagctggttgaatctggcggcggacttgtgaagcctggcggatctctgagactgagctgtgccgccagcggcttcacattccagaactacgccatgagctgggtccgacaggcccctggaaaaggccttgaatgggtgtccagcatcagcagcgacgccacctacacctactacgccgatagcgtgaagggcagattcaccatcagccgggacaacgccaagaacgtgctgtacctgcagatgaccagcctgagagccgaggataccgccgtgtactactgcgccagacatcctcctagctactactatgccttcgactactggggccagggcaccacactgacagtctcttctggcggctctggctctcaggttcagctggttcagtctggcgccgaagtggctaaacctggcgcctccgtgaaggtgtcctgtaaagccagcggctacacattcacccggtacaccatgcactgggtcaagcaggctccaggacaaggcttggagtggatcggctacatcaaccctagccggggctacaccaattacgcccagaagttccagggcaaggccacactgaccaccgacaagagcacaagcaccgcctacatggaactgagcagcctgagaagcgaggacaccgccgtgtactactgtgcccggtactacgacgaccactacagcctggattattggggccagggcacaaccctgaccgtgtcatctgcttcgaccaagggcccatccgtgtttcctctggctcccagcagcaagtctacaagcggaggaacagccgctctgggctgcctggtcaaggattactttcccgagcctgtgaccgtgtcctggaattctggcgctctgacaagcggcgtgcacacctttccagctgtgctgcaaagcagcggcctgtactctctgagcagcgtggtcacagtgcctagctctagcctgggcacccagacctacatctgcaatgtgaaccacaagcctagcaacaccaaggtggacaagaaggtggaacccaagagctgcgataagacccacacatgtcctccatgtcctgctccagaagctgctggcggcccttctgtgttcctgtttcctccaaagcctaaggacaccctgatgatcagcagaacccctgaagtgacctgcgtggtggtggatgtgtctcacgaggaccccgaagtgaagttcaattggtacgtggacggcgtggaagtgcacaacgccaagaccaagcctagagaggaacagtacaacagcacctacagagtggtgtccgtgctgaccgtgctgcaccaggattggctgaacggcaaagagtacaagtgcaaggtgtccaacaaggccctggccgctcctatcgagaaaaccatcagcaaggccaagggccagcctagggaaccccaggtttgtacccttcctccaagccgggatgagctgaccaagaaccaggtgtccctgagctgtgccgtgaagggcttctaccccagcgacattgccgtggaatgggagagcaatggccagcctgagaacaactacaagacaacccctcctgtgctggacagcgacggctcattcttcctggtgagcaagctgacagtcgacaagtccagatggcagcagggcaacgtgttcagttgcagcgtgatgcacgaggccctgcacaaccactacacccagaagtccctgagcctgtctcctgga

SEQ ID NO: 254 - protein, 222 aa, synthetic construct
  source 1..222: note = Trop2_317GShOKT3L
EIVLTQSPATLSLSPGERATLSCRASQSVDSYGNSFLHWYQQKPGQAPRLLIYWASNRATGIPARFSGSGSGTDFTLTISSLEPEDFAVYYCQQNNEDLWTFGGGTKLEIKGGSGSDIQLTQSPSSLSASVGDRVTITCRASQSISYLNWYQQKPGKSPKRWIYDTSKLASGVPSRFSGSGSGTDYTLTISSMQPEDAATYYCQQWSSNPLTFGGGTKVEIK

SEQ ID NO: 255 - DNA, 987 bp, synthetic construct
  source 1..987: mol_type = other DNA; note = Trop2_317GShOKT3L
gagatcgtgctgacacagtctcccgccacactgtcactgtctccaggcgaaagagccacactgagctgtagagccagccagagcgtggacagctacggcaatagcttcctgcactggtatcagcagaagcccggacaggctcccagactgctgatctactgggccagcaatagagccacaggcatccccgccagattttctggctctggcagcggcaccgatttcaccctgaccataagcagcctggaacctgaggacttcgccgtgtactactgccagcagaacaacgaggacctgtggacctttggcggaggcaccaagctggaaatcaagggcggctctggctctgacatccagctgacacagagcccttctagcctgtctgccagcgtgggcgacagagtgaccatcacatgtagagccagccagagcatcagctacctgaactggtatcagcagaagcccggcaagagccccaagcggtggatctacgatacaagcaagctggcctctggcgtgcccagcagattttctggctctggcagcggcaccgactacaccctgacaatcagcagcatgcagcctgaggatgccgccacctactactgccagcagtggtccagcaatcccctgacatttggcggaggcaccaaggtggaaatcaagcgtacggtggccgctcccagcgtgttcatcttcccacctagcgacgagcagctgaagtccggcacagcctctgtcgtgtgcctgctgaacaacttctacccccgcgaggccaaagtgcagtggaaggtggacaacgccctgcagagcggcaacagccaggaaagcgtgaccgagcaggacagcaaggactccacctacagcctgagcagcaccctgacactgagcaaggccgactacgagaagcacaaggtgtacgcctgcgaagtgacccaccagggcctgtctagccccgtgaccaagagcttcaaccggggcgagtgt

SEQ ID NO: 256 - protein, 576 aa, synthetic construct
  source 1..576: note = Trop2_317Cl7hOKT3HholeLALAPA
EVQLVESGGGLVKPGGSLRLSCAASGFTFQNYAMSWVRQAPGKGLEWVSSISSDATYTYYADSVKGRFTISRDNAKNVLYLQMTSLRAEDTAVYYCARHPPSYYYAFDYWGQGTTLTVSSGPAGLVSGQVQLVQSGAEVAKPGASVKVSCKASGYTFTRYTMHWVKQAPGQGLEWIGYINPSRGYTNYAQKFQGKATLTTDKSTSTAYMELSSLRSEDTAVYYCARYYDDHYSLDYWGQGTTLTVSSASTKGPSVFPLAPSSKSTSGGTAALGCLVKDYFPEPVTVSWNSGALTSGVHTFPAVLQSSGLYSLSSVVTVPSSSLGTQTYICNVNHKPSNTKVDKKVEPKSCDKTHTCPPCPAPEAAGGPSVFLFPPKPKDTLMISRTPEVTCVVVDVSHEDPEVKFNWYVDGVEVHNAKTKPREEQYNSTYRVVSVLTVLHQDWLNGKEYKCKVSNKALAAPIEKTISKAKGQPREPQVCTLPPSRDELTKNQVSLSCAVKGFYPSDIAVEWESNGQPENNYKTTPPVLDSDGSFFLVSKLTVDKSRWQQGNVFSCSVMHEALHNHYTQKSLSLSPG

SEQ ID NO: 257 - DNA, 1728 bp, synthetic construct
  source 1..1728: mol_type = other DNA; note = Trop2_317Cl7hOKT3HholeLALAPA
gaggtgcagctggttgaatctggcggcggacttgtgaagcctggcggatctctgagactgagctgtgccgccagcggcttcacattccagaactacgccatgagctgggtccgacaggcccctggaaaaggccttgaatgggtgtccagcatcagcagcgacgccacctacacctactacgccgatagcgtgaagggcagattcaccatcagccgggacaacgccaagaacgtgctgtacctgcagatgaccagcctgagagccgaggataccgccgtgtactactgcgccagacatcctcctagctactactatgccttcgactactggggccagggcaccacactgacagtctcttctggacctgctggacttgtcagcggacaggttcagctggttcagtctggcgccgaagtggctaaacctggcgcctccgtgaaggtgtcctgtaaagccagcggctacacattcacccggtacaccatgcactgggtcaagcaggctccaggacaaggcttggagtggatcggctacatcaaccctagccggggctacaccaattacgcccagaagttccagggcaaggccacactgaccaccgacaagagcacaagcaccgcctacatggaactgagcagcctgagaagcgaggacaccgccgtgtactactgtgcccggtactacgacgaccactacagcctggattattggggccagggcacaaccctgaccgtgtcatctgcttcgaccaagggcccatccgtgtttcctctggctcccagcagcaagtctacaagcggaggaacagccgctctgggctgcctggtcaaggattactttcccgagcctgtgaccgtgtcctggaattctggcgctctgacaagcggcgtgcacacctttccagctgtgctgcaaagcagcggcctgtactctctgagcagcgtggtcacagtgcctagctctagcctgggcacccagacctacatctgcaatgtgaaccacaagcctagcaacaccaaggtggacaagaaggtggaacccaagagctgcgataagacccacacatgtcctccatgtcctgctccagaagctgctggcggcccttctgtgttcctgtttcctccaaagcctaaggacaccctgatgatcagcagaacccctgaagtgacctgcgtggtggtggatgtgtctcacgaggaccccgaagtgaagttcaattggtacgtggacggcgtggaagtgcacaacgccaagaccaagcctagagaggaacagtacaacagcacctacagagtggtgtccgtgctgaccgtgctgcaccaggattggctgaacggcaaagagtacaagtgcaaggtgtccaacaaggccctggccgctcctatcgagaaaaccatcagcaaggccaagggccagcctagggaaccccaggtttgtacccttcctccaagccgggatgagctgaccaagaaccaggtgtccctgagctgtgccgtgaagggcttctaccccagcgacattgccgtggaatgggagagcaatggccagcctgagaacaactacaagacaacccctcctgtgctggacagcgacggctcattcttcctggtgagcaagctgacagtcgacaagtccagatggcagcagggcaacgtgttcagttgcagcgtgatgcacgaggccctgcacaaccactacacccagaagtccctgagcctgtctcctgga

SEQ ID NO: 258 - protein, 225 aa, synthetic construct
  source 1..225: note = Trop2_317Cl7hOKT3L
EIVLTQSPATLSLSPGERATLSCRASQSVDSYGNSFLHWYQQKPGQAPRLLIYWASNRATGIPARFSGSGSGTDFTLTISSLEPEDFAVYYCQQNNEDLWTFGGGTKLEIKGPAGLVSGDIQLTQSPSSLSASVGDRVTITCRASQSISYLNWYQQKPGKSPKRWIYDTSKLASGVPSRFSGSGSGTDYTLTISSMQPEDAATYYCQQWSSNPLTFGGGTKVEIK

SEQ ID NO: 259 - DNA, 996 bp, synthetic construct
  source 1..996: mol_type = other DNA; note = Trop2_317Cl7hOKT3L
gagatcgtgctgacacagtctcccgccacactgtcactgtctccaggcgaaagagccacactgagctgtagagccagccagagcgtggacagctacggcaatagcttcctgcactggtatcagcagaagcccggacaggctcccagactgctgatctactgggccagcaatagagccacaggcatccccgccagattttctggctctggcagcggcaccgatttcaccctgaccataagcagcctggaacctgaggacttcgccgtgtactactgccagcagaacaacgaggacctgtggacctttggcggaggcaccaagctggaaatcaagggacctgctggacttgtcagcggagacatccagctgacacagagcccttctagcctgtctgccagcgtgggcgacagagtgaccatcacatgtagagccagccagagcatcagctacctgaactggtatcagcagaagcccggcaagagccccaagcggtggatctacgatacaagcaagctggcctctggcgtgcccagcagattttctggctctggcagcggcaccgactacaccctgacaatcagcagcatgcagcctgaggatgccgccacctactactgccagcagtggtccagcaatcccctgacatttggcggaggcaccaaggtggaaatcaagcgtacggtggccgctcccagcgtgttcatcttcccacctagcgacgagcagctgaagtccggcacagcctctgtcgtgtgcctgctgaacaacttctacccccgcgaggccaaagtgcagtggaaggtggacaacgccctgcagagcggcaacagccaggaaagcgtgaccgagcaggacagcaaggactccacctacagcctgagcagcaccctgacactgagcaaggccgactacgagaagcacaaggtgtacgcctgcgaagtgacccaccagggcctgtctagccccgtgaccaagagcttcaaccggggcgagtgt

SEQ ID NO: 260 - protein, 576 aa, synthetic construct
  source 1..576: note = Trop2_317cl5hOKT3HholeLALAPA
EVQLVESGGGLVKPGGSLRLSCAASGFTFQNYAMSWVRQAPGKGLEWVSSISSDATYTYYADSVKGRFTISRDNAKNVLYLQMTSLRAEDTAVYYCARHPPSYYYAFDYWGQGTTLTVSSASTRKAGGQVQLVQSGAEVAKPGASVKVSCKASGYTFTRYTMHWVKQAPGQGLEWIGYINPSRGYTNYAQKFQGKATLTTDKSTSTAYMELSSLRSEDTAVYYCARYYDDHYSLDYWGQGTTLTVSSASTKGPSVFPLAPSSKSTSGGTAALGCLVKDYFPEPVTVSWNSGALTSGVHTFPAVLQSSGLYSLSSVVTVPSSSLGTQTYICNVNHKPSNTKVDKKVEPKSCDKTHTCPPCPAPEAAGGPSVFLFPPKPKDTLMISRTPEVTCVVVDVSHEDPEVKFNWYVDGVEVHNAKTKPREEQYNSTYRVVSVLTVLHQDWLNGKEYKCKVSNKALAAPIEKTISKAKGQPREPQVCTLPPSRDELTKNQVSLSCAVKGFYPSDIAVEWESNGQPENNYKTTPPVLDSDGSFFLVSKLTVDKSRWQQGNVFSCSVMHEALHNHYTQKSLSLSPG

SEQ ID NO: 261 - DNA, 1728 bp, synthetic construct
  source 1..1728: mol_type = other DNA; note = Trop2_317cl5hOKT3HholeLALAPA
gaggtgcagctggttgaatctggcggcggacttgtgaagcctggcggatctctgagactgagctgtgccgccagcggcttcacattccagaactacgccatgagctgggtccgacaggcccctggaaaaggccttgaatgggtgtccagcatcagcagcgacgccacctacacctactacgccgatagcgtgaagggcagattcaccatcagccgggacaacgccaagaacgtgctgtacctgcagatgaccagcctgagagccgaggataccgccgtgtactactgcgccagacatcctcctagctactactatgccttcgactactggggccagggcaccacactgacagtctcttctgccagcacacggaaggctggcggacaggttcagctggttcagtctggcgccgaagtggctaaacctggcgcctccgtgaaggtgtcctgtaaagccagcggctacacattcacccggtacaccatgcactgggtcaagcaggctccaggacaaggcttggagtggatcggctacatcaaccctagccggggctacaccaattacgcccagaagttccagggcaaggccacactgaccaccgacaagagcacaagcaccgcctacatggaactgagcagcctgagaagcgaggacaccgccgtgtactactgtgcccggtactacgacgaccactacagcctggattattggggccagggcacaaccctgaccgtgtcatctgcttcgaccaagggcccatccgtgtttcctctggctcccagcagcaagtctacaagcggaggaacagccgctctgggctgcctggtcaaggattactttcccgagcctgtgaccgtgtcctggaattctggcgctctgacaagcggcgtgcacacctttccagctgtgctgcaaagcagcggcctgtactctctgagcagcgtggtcacagtgcctagctctagcctgggcacccagacctacatctgcaatgtgaaccacaagcctagcaacaccaaggtggacaagaaggtggaacccaagagctgcgataagacccacacatgtcctccatgtcctgctccagaagctgctggcggcccttctgtgttcctgtttcctccaaagcctaaggacaccctgatgatcagcagaacccctgaagtgacctgcgtggtggtggatgtgtctcacgaggaccccgaagtgaagttcaattggtacgtggacggcgtggaagtgcacaacgccaagaccaagcctagagaggaacagtacaacagcacctacagagtggtgtccgtgctgaccgtgctgcaccaggattggctgaacggcaaagagtacaagtgcaaggtgtccaacaaggccctggccgctcctatcgagaaaaccatcagcaaggccaagggccagcctagggaaccccaggtttgtacccttcctccaagccgggatgagctgaccaagaaccaggtgtccctgagctgtgccgtgaagggcttctaccccagcgacattgccgtggaatgggagagcaatggccagcctgagaacaactacaagacaacccctcctgtgctggacagcgacggctcattcttcctggtgagcaagctgacagtcgacaagtccagatggcagcagggcaacgtgttcagttgcagcgtgatgcacgaggccctgcacaaccactacacccagaagtccctgagcctgtctcctgga

SEQ ID NO: 262 - protein, 575 aa, synthetic construct
  source 1..575: note = Trop2_317cl8hOKT3HholeLALAPA
EVQLVESGGGLVKPGGSLRLSCAASGFTFQNYAMSWVRQAPGKGLEWVSSISSDATYTYYADSVKGRFTISRDNAKNVLYLQMTSLRAEDTAVYYCARHPPSYYYAFDYWGQGTTLTVSSASTRKAGQVQLVQSGAEVAKPGASVKVSCKASGYTFTRYTMHWVKQAPGQGLEWIGYINPSRGYTNYAQKFQGKATLTTDKSTSTAYMELSSLRSEDTAVYYCARYYDDHYSLDYWGQGTTLTVSSASTKGPSVFPLAPSSKSTSGGTAALGCLVKDYFPEPVTVSWNSGALTSGVHTFPAVLQSSGLYSLSSVVTVPSSSLGTQTYICNVNHKPSNTKVDKKVEPKSCDKTHTCPPCPAPEAAGGPSVFLFPPKPKDTLMISRTPEVTCVVVDVSHEDPEVKFNWYVDGVEVHNAKTKPREEQYNSTYRVVSVLTVLHQDWLNGKEYKCKVSNKALAAPIEKTISKAKGQPREPQVCTLPPSRDELTKNQVSLSCAVKGFYPSDIAVEWESNGQPENNYKTTPPVLDSDGSFFLVSKLTVDKSRWQQGNVFSCSVMHEALHNHYTQKSLSLSPG

SEQ ID NO: 263 - DNA, 1725 bp, synthetic construct
  source 1..1725: mol_type = other DNA; note = Trop2_317cl8hOKT3HholeLALAPA
gaggtgcagctggttgaatctggcggcggacttgtgaagcctggcggatctctgagactgagctgtgccgccagcggcttcacattccagaactacgccatgagctgggtccgacaggcccctggaaaaggccttgaatgggtgtccagcatcagcagcgacgccacctacacctactacgccgatagcgtgaagggcagattcaccatcagccgggacaacgccaagaacgtgctgtacctgcagatgaccagcctgagagccgaggataccgccgtgtactactgcgccagacatcctcctagctactactatgccttcgactactggggccagggcaccacactgacagtctcttctgctagcacacggaaggctggccaggttcagctggttcagtctggcgccgaagtggctaaacctggcgcctccgtgaaggtgtcctgtaaagccagcggctacacattcacccggtacaccatgcactgggtcaagcaggctccaggacaaggcttggagtggatcggctacatcaaccctagccggggctacaccaattacgcccagaagttccagggcaaggccacactgaccaccgacaagagcacaagcaccgcctacatggaactgagcagcctgagaagcgaggacaccgccgtgtactactgtgcccggtactacgacgaccactacagcctggattattggggccagggcacaaccctgaccgtgtcatctgcttcgaccaagggcccatccgtgtttcctctggctcccagcagcaagtctacaagcggaggaacagccgctctgggctgcctggtcaaggattactttcccgagcctgtgaccgtgtcctggaattctggcgctctgacaagcggcgtgcacacctttccagctgtgctgcaaagcagcggcctgtactctctgagcagcgtggtcacagtgcctagctctagcctgggcacccagacctacatctgcaatgtgaaccacaagcctagcaacaccaaggtggacaagaaggtggaacccaagagctgcgataagacccacacatgtcctccatgtcctgctccagaagctgctggcggcccttctgtgttcctgtttcctccaaagcctaaggacaccctgatgatcagcagaacccctgaagtgacctgcgtggtggtggatgtgtctcacgaggaccccgaagtgaagttcaattggtacgtggacggcgtggaagtgcacaacgccaagaccaagcctagagaggaacagtacaacagcacctacagagtggtgtccgtgctgaccgtgctgcaccaggattggctgaacggcaaagagtacaagtgcaaggtgtccaacaaggccctggccgctcctatcgagaaaaccatcagcaaggccaagggccagcctagggaaccccaggtttgtacccttcctccaagccgggatgagctgaccaagaaccaggtgtccctgagctgtgccgtgaagggcttctaccccagcgacattgccgtggaatgggagagcaatggccagcctgagaacaactacaagacaacccctcctgtgctggacagcgacggctcattcttcctggtgagcaagctgacagtcgacaagtccagatggcagcagggcaacgtgttcagttgcagcgtgatgcacgaggccctgcacaaccactacacccagaagtccctgagcctgtctcctgga

SEQ ID NO: 264 - protein, 575 aa, synthetic construct
  source 1..575: note = Trop2_317cl9hOKT3HholeLALAPA
EVQLVESGGGLVKPGGSLRLSCAASGFTFQNYAMSWVRQAPGKGLEWVSSISSDATYTYYADSVKGRFTISRDNAKNVLYLQMTSLRAEDTAVYYCARHPPSYYYAFDYWGQGTTLTVSSSTRKAGGQVQLVQSGAEVAKPGASVKVSCKASGYTFTRYTMHWVKQAPGQGLEWIGYINPSRGYTNYAQKFQGKATLTTDKSTSTAYMELSSLRSEDTAVYYCARYYDDHYSLDYWGQGTTLTVSSASTKGPSVFPLAPSSKSTSGGTAALGCLVKDYFPEPVTVSWNSGALTSGVHTFPAVLQSSGLYSLSSVVTVPSSSLGTQTYICNVNHKPSNTKVDKKVEPKSCDKTHTCPPCPAPEAAGGPSVFLFPPKPKDTLMISRTPEVTCVVVDVSHEDPEVKFNWYVDGVEVHNAKTKPREEQYNSTYRVVSVLTVLHQDWLNGKEYKCKVSNKALAAPIEKTISKAKGQPREPQVCTLPPSRDELTKNQVSLSCAVKGFYPSDIAVEWESNGQPENNYKTTPPVLDSDGSFFLVSKLTVDKSRWQQGNVFSCSVMHEALHNHYTQKSLSLSPG

SEQ ID NO: 265 - DNA, 1725 bp, synthetic construct
  source 1..1725: mol_type = other DNA; note = Trop2_317cl9hOKT3HholeLALAPA
gaggtgcagctggttgaatctggcggcggacttgtgaagcctggcggatctctgagactgagctgtgccgccagcggcttcacattccagaactacgccatgagctgggtccgacaggcccctggaaaaggccttgaatgggtgtccagcatcagcagcgacgccacctacacctactacgccgatagcgtgaagggcagattcaccatcagccgggacaacgccaagaacgtgctgtacctgcagatgaccagcctgagagccgaggataccgccgtgtactactgcgccagacatcctcctagctactactatgccttcgactactggggccagggcaccacactgacagtctcttctagcacgcgtaaggctggcggacaggttcagctggttcagtctggcgccgaagtggctaaacctggcgcctccgtgaaggtgtcctgtaaagccagcggctacacattcacccggtacaccatgcactgggtcaagcaggctccaggacaaggcttggagtggatcggctacatcaaccctagccggggctacaccaattacgcccagaagttccagggcaaggccacactgaccaccgacaagagcacaagcaccgcctacatggaactgagcagcctgagaagcgaggacaccgccgtgtactactgtgcccggtactacgacgaccactacagcctggattattggggccagggcacaaccctgaccgtgtcatctgcttcgaccaagggcccatccgtgtttcctctggctcccagcagcaagtctacaagcggaggaacagccgctctgggctgcctggtcaaggattactttcccgagcctgtgaccgtgtcctggaattctggcgctctgacaagcggcgtgcacacctttccagctgtgctgcaaagcagcggcctgtactctctgagcagcgtggtcacagtgcctagctctagcctgggcacccagacctacatctgcaatgtgaaccacaagcctagcaacaccaaggtggacaagaaggtggaacccaagagctgcgataagacccacacatgtcctccatgtcctgctccagaagctgctggcggcccttctgtgttcctgtttcctccaaagcctaaggacaccctgatgatcagcagaacccctgaagtgacctgcgtggtggtggatgtgtctcacgaggaccccgaagtgaagttcaattggtacgtggacggcgtggaagtgcacaacgccaagaccaagcctagagaggaacagtacaacagcacctacagagtggtgtccgtgctgaccgtgctgcaccaggattggctgaacggcaaagagtacaagtgcaaggtgtccaacaaggccctggccgctcctatcgagaaaaccatcagcaaggccaagggccagcctagggaaccccaggtttgtacccttcctccaagccgggatgagctgaccaagaaccaggtgtccctgagctgtgccgtgaagggcttctaccccagcgacattgccgtggaatgggagagcaatggccagcctgagaacaactacaagacaacccctcctgtgctggacagcgacggctcattcttcctggtgagcaagctgacagtcgacaagtccagatggcagcagggcaacgtgttcagttgcagcgtgatgcacgaggccctgcacaaccactacacccagaagtccctgagcctgtctcctgga

SEQ ID NO: 266 - protein, 225 aa, synthetic construct
  source 1..225: note = Trop2_317cl5hOKT3L
EIVLTQSPATLSLSPGERATLSCRASQSVDSYGNSFLHWYQQKPGQAPRLLIYWASNRATGIPARFSGSGSGTDFTLTISSLEPEDFAVYYCQQNNEDLWTFGGGTKLEIKASTRKAGGDIQLTQSPSSLSASVGDRVTITCRASQSISYLNWYQQKPGKSPKRWIYDTSKLASGVPSRFSGSGSGTDYTLTISSMQPEDAATYYCQQWSSNPLTFGGGTKVEIK

SEQ ID NO: 267 - DNA, 996 bp, synthetic construct
  source 1..996: mol_type = other DNA; note = Trop2_317cl5hOKT3L
gagatcgtgctgacacagtctcccgccacactgtcactgtctccaggcgaaagagccacactgagctgtagagccagccagagcgtggacagctacggcaatagcttcctgcactggtatcagcagaagcccggacaggctcccagactgctgatctactgggccagcaatagagccacaggcatccccgccagattttctggctctggcagcggcaccgatttcaccctgaccataagcagcctggaacctgaggacttcgccgtgtactactgccagcagaacaacgaggacctgtggacctttggcggaggcaccaagctggaaatcaaggccagcacacggaaggctggcggagacatccagctgacacagagcccttctagcctgtctgccagcgtgggcgacagagtgaccatcacatgtagagccagccagagcatcagctacctgaactggtatcagcagaagcccggcaagagccccaagcggtggatctacgatacaagcaagctggcctctggcgtgcccagcagattttctggctctggcagcggcaccgactacaccctgacaatcagcagcatgcagcctgaggatgccgccacctactactgccagcagtggtccagcaatcccctgacatttggcggaggcaccaaggtggaaatcaagcgtacggtggccgctcccagcgtgttcatcttcccacctagcgacgagcagctgaagtccggcacagcctctgtcgtgtgcctgctgaacaacttctacccccgcgaggccaaagtgcagtggaaggtggacaacgccctgcagagcggcaacagccaggaaagcgtgaccgagcaggacagcaaggactccacctacagcctgagcagcaccctgacactgagcaaggccgactacgagaagcacaaggtgtacgcctgcgaagtgacccaccagggcctgtctagccccgtgaccaagagcttcaaccggggcgagtgt

SEQ ID NO: 268 - protein, 224 aa, synthetic construct
  source 1..224: note = Trop2_317cl8hOKT3L
EIVLTQSPATLSLSPGERATLSCRASQSVDSYGNSFLHWYQQKPGQAPRLLIYWASNRATGIPARFSGSGSGTDFTLTISSLEPEDFAVYYCQQNNEDLWTFGGGTKLEIKASTRKAGDIQLTQSPSSLSASVGDRVTITCRASQSISYLNWYQQKPGKSPKRWIYDTSKLASGVPSRFSGSGSGTDYTLTISSMQPEDAATYYCQQWSSNPLTFGGGTKVEIK

SEQ ID NO: 269 - DNA, 993 bp, synthetic construct
  source 1..993: mol_type = other DNA; note = Trop2_317cl8hOKT3L
gagatcgtgctgacacagtctcccgccacactgtcactgtctccaggcgaaagagccacactgagctgtagagccagccagagcgtggacagctacggcaatagcttcctgcactggtatcagcagaagcccggacaggctcccagactgctgatctactgggccagcaatagagccacaggcatccccgccagattttctggctctggcagcggcaccgatttcaccctgaccataagcagcctggaacctgaggacttcgccgtgtactactgccagcagaacaacgaggacctgtggacctttggcggaggcaccaagctggaaatcaaggctagcacacggaaggctggcgacatccagctgacacagagcccttctagcctgtctgccagcgtgggcgacagagtgaccatcacatgtagagccagccagagcatcagctacctgaactggtatcagcagaagcccggcaagagccccaagcggtggatctacgatacaagcaagctggcctctggcgtgcccagcagattttctggctctggcagcggcaccgactacaccctgacaatcagcagcatgcagcctgaggatgccgccacctactactgccagcagtggtccagcaatcccctgacatttggcggaggcaccaaggtggaaatcaagcgtacggtggccgctcccagcgtgttcatcttcccacctagcgacgagcagctgaagtccggcacagcctctgtcgtgtgcctgctgaacaacttctacccccgcgaggccaaagtgcagtggaaggtggacaacgccctgcagagcggcaacagccaggaaagcgtgaccgagcaggacagcaaggactccacctacagcctgagcagcaccctgacactgagcaaggccgactacgagaagcacaaggtgtacgcctgcgaagtgacccaccagggcctgtctagccccgtgaccaagagcttcaaccggggcgagtgt

SEQ ID NO: 270 - protein, 224 aa, synthetic construct
  source 1..224: note = Trop2_317cl9hOKT3L
EIVLTQSPATLSLSPGERATLSCRASQSVDSYGNSFLHWYQQKPGQAPRLLIYWASNRATGIPARFSGSGSGTDFTLTISSLEPEDFAVYYCQQNNEDLWTFGGGTKLEIKSTRKAGGDIQLTQSPSSLSASVGDRVTITCRASQSISYLNWYQQKPGKSPKRWIYDTSKLASGVPSRFSGSGSGTDYTLTISSMQPEDAATYYCQQWSSNPLTFGGGTKVEIK

SEQ ID NO: 271 - DNA, 993 bp, synthetic construct
  source 1..993: mol_type = other DNA; note = Trop2_317cl9hOKT3L
gagatcgtgctgacacagtctcccgccacactgtcactgtctccaggcgaaagagccacactgagctgtagagccagccagagcgtggacagctacggcaatagcttcctgcactggtatcagcagaagcccggacaggctcccagactgctgatctactgggccagcaatagagccacaggcatccccgccagattttctggctctggcagcggcaccgatttcaccctgaccataagcagcctggaacctgaggacttcgccgtgtactactgccagcagaacaacgaggacctgtggacctttggcggaggcaccaagctggaaatcaagagcacgcgtaaggctggcggagacatccagctgacacagagcccttctagcctgtctgccagcgtgggcgacagagtgaccatcacatgtagagccagccagagcatcagctacctgaactggtatcagcagaagcccggcaagagccccaagcggtggatctacgatacaagcaagctggcctctggcgtgcccagcagattttctggctctggcagcggcaccgactacaccctgacaatcagcagcatgcagcctgaggatgccgccacctactactgccagcagtggtccagcaatcccctgacatttggcggaggcaccaaggtggaaatcaagcgtacggtggccgctcccagcgtgttcatcttcccacctagcgacgagcagctgaagtccggcacagcctctgtcgtgtgcctgctgaacaacttctacccccgcgaggccaaagtgcagtggaaggtggacaacgccctgcagagcggcaacagccaggaaagcgtgaccgagcaggacagcaaggactccacctacagcctgagcagcaccctgacactgagcaaggccgactacgagaagcacaaggtgtacgcctgcgaagtgacccaccagggcctgtctagccccgtgaccaagagcttcaaccggggcgagtgt

SEQ ID NO: 272 - protein, 713 aa, synthetic construct
  source 1..713: note = Trop2_h20TG28csL1KnobLALAPA
DIQMTQSPSSLSASVGDRVTITCQASQDINKYLAWYQKKPGKAPKLLIHYTSNLQTGVPSRFSGSGSGTDFTFTISSLQPEDIATYYCLQYDDLFTFGQGTKLEIKGGSSGDIQMTQSPSSLSASVGDRVTITCHASQNIYVWLNWYQQKPGKAPKLLIYKASNLHTGVPSRFSGSGSGTDFTLTISSLQPEDFATYYCQQGQTYPYTFGGGTKVEIKGGGGSGGSGSGGGGSASGSGQVQLVQSGAEVKKPGASVKVSCKASGYTFTSYYIHWVRQAPGQGLEWIGSIYPGNVNTNYNEKFKDRATLTVDTSISTAYMELSRLRSDDTAVYFCTRSHYGLDWNFDVWGQGTTVTVSSGGSSGQVQLVQSGAEVKKPGASVKVSCKASGSSFTGYTMNWVKQAPGQGLEWIGIINPYQGDTTYNQKFQGKVTITVDKSTSTVYMELSSLRSEDTAVYYCARGAGLYYFDYWGQGTTVTVSSASGGSGDKTHTCPPCPAPEAAGGPSVFLFPPKPKDTLMISRTPEVTCVVVDVSHEDPEVKFNWYVDGVEVHNAKTKPREEQYNSTYRVVSVLTVLHQDWLNGKEYKCKVSNKALAAPIEKTISKAKGQPREPQVYTLPPCRDELTKNQVSLWCLVKGFYPSDIAVEWESNGQPENNYKTTPPVLDSDGSFFLYSKLTVDKSRWQQGNVFSCSVMHEALHNHYTQKSLSLSPG

SEQ ID NO: 273 - DNA, 2139 bp, synthetic construct
  source 1..2139: mol_type = other DNA; note = Trop2_h20TG28csL1KnobLALAPA
gacatccagatgacacagagccctagcagcctgtctgccagcgtgggagacagagtgaccattacctgtcaggccagccaggacatcaacaagtacctggcctggtatcagaagaagcccggcaaggctcctaagctgctgatccactacaccagcaacctgcagacaggcgtgcccagcagattttctggcagcggctctggcaccgacttcaccttcaccataagcagcctgcagcctgaggatatcgccacctactactgcctgcagtacgacgacctgttcacctttggccagggcaccaagctggaaatcaaaggcggatcttctggagacatccagatgacacagagccctagcagcctgtctgccagcgtgggagacagagtgaccatcacatgtcacgccagccagaacatctacgtgtggctgaactggtatcagcagaagcccggcaaggcccctaagctgctgatctacaaggccagcaatctgcacaccggcgtgcccagcagattttctggctctggcagcggcaccgacttcaccctgaccatatctagcctgcagcctgaggacttcgccacctactattgtcagcagggccagacatacccctacacctttggcggcggaacaaaggtggaaatcaagggaggcggaggatctggcggatctggaagtggcggcggtggatctgcttctggctctggccaggttcagctggttcagtctggcgccgaagtgaagaaacctggcgcctctgtgaaggtgtcctgcaaggccagcggctacacctttaccagctactacatccactgggtccgacaggcccctggacaaggactggaatggatcggcagcatctaccccggcaacgtgaacaccaactacaacgagaagttcaaggaccgggccacactgaccgtggacacctctatcagcaccgcctacatggaactgagccggctgagatccgatgataccgccgtgtacttctgcaccagaagccactacggcctggactggaacttcgatgtgtggggccagggcaccaccgtgacagtttcttctggaggcagctctggccaggtgcagctggtgcagtctggcgccgaagttaagaaacctggcgcctccgtgaaggtgtcctgtaaagccagcggcagcagcttcaccggctacaccatgaactgggtcaagcaggctcctggacagggactcgagtggatcggcatcatcaacccctaccagggcgacaccacctacaaccagaagttccagggcaaagtcaccatcaccgtggacaagagcaccagcaccgtgtacatggaactgtccagcctgagaagcgaggacaccgccgtgtactactgtgctagaggcgccggactgtactacttcgactattggggccagggaaccaccgtgaccgttagctctgcttctggcggctccggagataagacccacacatgtcctccatgtcctgctccagaagctgctggcggcccttctgtgttcctgtttcctccaaagcctaaggacaccctgatgatcagcagaacccctgaagtgacctgcgtggtggtggatgtgtctcacgaggaccccgaagtgaagttcaattggtacgtggacggcgtggaagtgcacaacgccaagaccaagcctagagaggaacagtacaacagcacctacagagtggtgtccgtgctgaccgtgctgcaccaggattggctgaacggcaaagagtacaagtgcaaggtgtccaacaaggccctggccgctcctatcgagaaaaccatcagcaaggccaagggccagcctagggaaccccaggtttacacccttcctccatgccgggatgagctgaccaagaaccaggtgtccctgtggtgtctcgtgaagggcttctaccccagcgacattgccgtggaatgggagagcaatggccagcctgagaacaactacaagacaacccctcctgtgctggacagcgacggctcattcttcctgtacagcaagctgacagtcgacaagtccagatggcagcagggcaacgtgttcagttgcagcgtgatgcacgaggccctgcacaaccactacacccagaagtccctgagcctgtctcctgga

SEQ ID NO: 274 - protein, 713 aa, synthetic construct
  source 1..713: note = TG28cs_Trop2_h20L1KnobLALAPA
DIQMTQSPSSLSASVGDRVTITCHASQNIYVWLNWYQQKPGKAPKLLIYKASNLHTGVPSRFSGSGSGTDFTLTISSLQPEDFATYYCQQGQTYPYTFGGGTKVEIKGGSSGDIQMTQSPSSLSASVGDRVTITCQASQDINKYLAWYQKKPGKAPKLLIHYTSNLQTGVPSRFSGSGSGTDFTFTISSLQPEDIATYYCLQYDDLFTFGQGTKLEIKGGGGSGGSGSGGGGSASGSGQVQLVQSGAEVKKPGASVKVSCKASGSSFTGYTMNWVKQAPGQGLEWIGIINPYQGDTTYNQKFQGKVTITVDKSTSTVYMELSSLRSEDTAVYYCARGAGLYYFDYWGQGTTVTVSSGGSSGQVQLVQSGAEVKKPGASVKVSCKASGYTFTSYYIHWVRQAPGQGLEWIGSIYPGNVNTNYNEKFKDRATLTVDTSISTAYMELSRLRSDDTAVYFCTRSHYGLDWNFDVWGQGTTVTVSSASGGSGDKTHTCPPCPAPEAAGGPSVFLFPPKPKDTLMISRTPEVTCVVVDVSHEDPEVKFNWYVDGVEVHNAKTKPREEQYNSTYRVVSVLTVLHQDWLNGKEYKCKVSNKALAAPIEKTISKAKGQPREPQVYTLPPCRDELTKNQVSLWCLVKGFYPSDIAVEWESNGQPENNYKTTPPVLDSDGSFFLYSKLTVDKSRWQQGNVFSCSVMHEALHNHYTQKSLSLSPG

SEQ ID NO: 275 - DNA, 2139 bp, synthetic construct
  source 1..2139: mol_type = other DNA; note = TG28cs_Trop2_h20L1KnobLALAPA
gacatccagatgacacagagccctagcagcctgtctgccagcgtgggagacagagtgaccatcacatgtcacgccagccagaacatctacgtgtggctgaactggtatcagcagaagcccggcaaggcccctaagctgctgatctacaaggccagcaatctgcacaccggcgtgcccagcagattttctggctctggcagcggcaccgacttcaccctgaccatatctagcctgcagcctgaggacttcgccacctactattgtcagcagggccagacatacccctacacctttggcggcggaacaaaggtggaaatcaagggcggatcttctggagacatccagatgacacagagccctagcagcctgtctgccagcgtgggagacagagtgaccattacctgtcaggccagccaggacatcaacaagtacctggcctggtatcagaagaagcccggcaaggctcctaagctgctgatccactacaccagcaacctgcagacaggcgtgcccagcagattttctggcagcggctctggcaccgacttcaccttcaccataagcagcctgcagcctgaggatatcgccacctactactgcctgcagtacgacgacctgttcacctttggccagggcaccaagctggaaatcaaaggaggcggaggatctggcggatctggaagtggcggcggtggatctgcttctggctctggccaggtgcagctggtgcagtctggcgccgaagttaagaaacctggcgcctccgtgaaggtgtcctgtaaagccagcggcagcagcttcaccggctacaccatgaactgggtcaagcaggctcctggacagggactcgagtggatcggcatcatcaacccctaccagggcgacaccacctacaaccagaagttccagggcaaagtcaccatcaccgtggacaagagcaccagcaccgtgtacatggaactgtccagcctgagaagcgaggacaccgccgtgtactactgtgctagaggcgccggactgtactacttcgactattggggccagggaaccaccgtgaccgttagctctggaggcagctctggccaggttcagctggttcagtctggcgccgaagtgaagaaacctggcgcctctgtgaaggtgtcctgcaaggccagcggctacacctttaccagctactacatccactgggtccgacaggcccctggacaaggactggaatggatcggcagcatctaccccggcaacgtgaacaccaactacaacgagaagttcaaggaccgggccacactgaccgtggacacctctatcagcaccgcctacatggaactgagccggctgagatccgatgataccgccgtgtacttctgcaccagaagccactacggcctggactggaacttcgatgtgtggggccagggcaccaccgtgacagtttcttctgcttctggcggctccggagataagacccacacatgtcctccatgtcctgctccagaagctgctggcggcccttctgtgttcctgtttcctccaaagcctaaggacaccctgatgatcagcagaacccctgaagtgacctgcgtggtggtggatgtgtctcacgaggaccccgaagtgaagttcaattggtacgtggacggcgtggaagtgcacaacgccaagaccaagcctagagaggaacagtacaacagcacctacagagtggtgtccgtgctgaccgtgctgcaccaggattggctgaacggcaaagagtacaagtgcaaggtgtccaacaaggccctggccgctcctatcgagaaaaccatcagcaaggccaagggccagcctagggaaccccaggtttacacccttcctccatgccgggatgagctgaccaagaaccaggtgtccctgtggtgtctcgtgaagggcttctaccccagcgacattgccgtggaatgggagagcaatggccagcctgagaacaactacaagacaacccctcctgtgctggacagcgacggctcattcttcctgtacagcaagctgacagtcgacaagtccagatggcagcagggcaacgtgttcagttgcagcgtgatgcacgaggccctgcacaaccactacacccagaagtccctgagcctgtctcctgga

SEQ ID NO: 276 - protein, 571 aa, synthetic construct
  source 1..571: note = Trop2_h20GShOKT3HoleLALAPA
QVQLVQSGAEVKKPGASVKVSCKASGSSFTGYTMNWVKQAPGQGLEWIGIINPYQGDTTYNQKFQGKVTITVDKSTSTVYMELSSLRSEDTAVYYCARGAGLYYFDYWGQGTTVTVSSGGSGSQVQLVQSGAEVAKPGASVKVSCKASGYTFTRYTMHWVKQAPGQGLEWIGYINPSRGYTNYAQKFQGKATLTTDKSTSTAYMELSSLRSEDTAVYYCARYYDDHYSLDYWGQGTTLTVSSASTKGPSVFPLAPSSKSTSGGTAALGCLVKDYFPEPVTVSWNSGALTSGVHTFPAVLQSSGLYSLSSVVTVPSSSLGTQTYICNVNHKPSNTKVDKKVEPKSCDKTHTCPPCPAPEAAGGPSVFLFPPKPKDTLMISRTPEVTCVVVDVSHEDPEVKFNWYVDGVEVHNAKTKPREEQYNSTYRVVSVLTVLHQDWLNGKEYKCKVSNKALAAPIEKTISKAKGQPREPQVCTLPPSRDELTKNQVSLSCAVKGFYPSDIAVEWESNGQPENNYKTTPPVLDSDGSFFLVSKLTVDKSRWQQGNVFSCSVMHEALHNHYTQKSLSLSPG

SEQ ID NO: 277 - DNA, 1713 bp, synthetic construct
  source 1..1713: mol_type = other DNA; note = Trop2_h20GShOKT3HoleLALAPA
caggtgcagctggtgcagtctggcgccgaagttaagaaacctggcgcctccgtgaaggtgtcctgtaaagccagcggcagcagcttcaccggctacaccatgaactgggtcaagcaggctcctggacagggactcgagtggatcggcatcatcaacccctaccagggcgacaccacctacaaccagaagttccagggcaaagtcaccatcaccgtggacaagagcaccagcaccgtgtacatggaactgtccagcctgagaagcgaggacaccgccgtgtactactgtgctagaggcgccggactgtactacttcgactattggggccagggaaccaccgtgaccgttagctctggcggctccggaagccaggttcagctggttcagtctggcgccgaagtggctaaacctggcgcctccgtgaaggtgtcctgtaaagccagcggctacacattcacccggtacaccatgcactgggtcaagcaggctccaggacaaggcttggagtggatcggctacatcaaccctagccggggctacaccaattacgcccagaagttccagggcaaggccacactgaccaccgacaagagcacaagcaccgcctacatggaactgagcagcctgagaagcgaggacaccgccgtgtactactgtgcccggtactacgacgaccactacagcctggattattggggccagggcacaaccctgaccgtgtcatctgcttcgaccaagggcccatccgtgtttcctctggctcccagcagcaagtctacaagcggaggaacagccgctctgggctgcctggtcaaggattactttcccgagcctgtgaccgtgtcctggaattctggcgctctgacaagcggcgtgcacacctttccagctgtgctgcaaagcagcggcctgtactctctgagcagcgtggtcacagtgcctagctctagcctgggcacccagacctacatctgcaatgtgaaccacaagcctagcaacaccaaggtggacaagaaggtggaacccaagagctgcgataagacccacacatgtcctccatgtcctgctccagaagctgctggcggcccttctgtgttcctgtttcctccaaagcctaaggacaccctgatgatcagcagaacccctgaagtgacctgcgtggtggtggatgtgtctcacgaggaccccgaagtgaagttcaattggtacgtggacggcgtggaagtgcacaacgccaagaccaagcctagagaggaacagtacaacagcacctacagagtggtgtccgtgctgaccgtgctgcaccaggattggctgaacggcaaagagtacaagtgcaaggtgtccaacaaggccctggccgctcctatcgagaaaaccatcagcaaggccaagggccagcctagggaaccccaggtttgtacccttcctccaagccgggatgagctgaccaagaaccaggtgtccctgagctgtgccgtgaagggcttctaccccagcgacattgccgtggaatgggagagcaatggccagcctgagaacaactacaagacaacccctcctgtgctggacagcgacggctcattcttcctggtgagcaagctgacagtcgacaagtccagatggcagcagggcaacgtgttcagttgcagcgtgatgcacgaggccctgcacaaccactacacccagaagtccctgagcctgtctcctgga

SEQ ID NO: 278 - protein, 324 aa, synthetic construct
  source 1..324: note = Trop2_h20GShOKT3L
DIQMTQSPSSLSASVGDRVTITCQASQDINKYLAWYQKKPGKAPKLLIHYTSNLQTGVPSRFSGSGSGTDFTFTISSLQPEDIATYYCLQYDDLFTFGQGTKLEIKGGSGSDIQLTQSPSSLSASVGDRVTITCRASQSISYLNWYQQKPGKSPKRWIYDTSKLASGVPSRFSGSGSGTDYTLTISSMQPEDAATYYCQQWSSNPLTFGGGTKVEIKRTVAAPSVFIFPPSDEQLKSGTASVVCLLNNFYPREAKVQWKVDNALQSGNSQESVTEQDSKDSTYSLSSTLTLSKADYEKHKVYACEVTHQGLSSPVTKSFNRGEC

SEQ ID NO: 279 - DNA, 972 bp, synthetic construct
  source 1..972: mol_type = other DNA; note = Trop2_h20GShOKT3L
gacatccagatgacacagagccctagcagcctgtctgccagcgtgggagacagagtgaccattacctgtcaggccagccaggacatcaacaagtacctggcctggtatcagaagaagcccggcaaggctcctaagctgctgatccactacaccagcaacctgcagacaggcgtgcccagcagattttctggcagcggctctggcaccgacttcaccttcaccataagcagcctgcagcctgaggatatcgccacctactactgcctgcagtacgacgacctgttcacctttggccagggcaccaagctggaaatcaaaggcggctccggaagcgacatccagctgacacagagcccttctagcctgtctgccagcgtgggcgacagagtgaccatcacatgtagagccagccagagcatcagctacctgaactggtatcagcagaagcccggcaagagccccaagcggtggatctacgatacaagcaagctggcctctggcgtgcccagcagattttctggctctggcagcggcaccgactacaccctgacaatcagcagcatgcagcctgaggatgccgccacctactactgccagcagtggtccagcaatcccctgacatttggcggaggcaccaaggtggaaatcaagcgtacggtggccgctcccagcgtgttcatcttcccacctagcgacgagcagctgaagtccggcacagcctctgtcgtgtgcctgctgaacaacttctacccccgcgaggccaaagtgcagtggaaggtggacaacgccctgcagagcggcaacagccaggaaagcgtgaccgagcaggacagcaaggactccacctacagcctgagcagcaccctgacactgagcaaggccgactacgagaagcacaaggtgtacgcctgcgaagtgacccaccagggcctgtctagccccgtgaccaagagcttcaaccggggcgagtgt

SEQ ID NO: 280 - protein, 574 aa, synthetic construct
  source 1..574: note = Trop2_h20Cl7hOKT3HoleLALAPA
QVQLVQSGAEVKKPGASVKVSCKASGSSFTGYTMNWVKQAPGQGLEWIGIINPYQGDTTYNQKFQGKVTITVDKSTSTVYMELSSLRSEDTAVYYCARGAGLYYFDYWGQGTTVTVSSGPAGLVSGQVQLVQSGAEVAKPGASVKVSCKASGYTFTRYTMHWVKQAPGQGLEWIGYINPSRGYTNYAQKFQGKATLTTDKSTSTAYMELSSLRSEDTAVYYCARYYDDHYSLDYWGQGTTLTVSSASTKGPSVFPLAPSSKSTSGGTAALGCLVKDYFPEPVTVSWNSGALTSGVHTFPAVLQSSGLYSLSSVVTVPSSSLGTQTYICNVNHKPSNTKVDKKVEPKSCDKTHTCPPCPAPEAAGGPSVFLFPPKPKDTLMISRTPEVTCVVVDVSHEDPEVKFNWYVDGVEVHNAKTKPREEQYNSTYRVVSVLTVLHQDWLNGKEYKCKVSNKALAAPIEKTISKAKGQPREPQVCTLPPSRDELTKNQVSLSCAVKGFYPSDIAVEWESNGQPENNYKTTPPVLDSDGSFFLVSKLTVDKSRWQQGNVFSCSVMHEALHNHYTQKSLSLSPG

SEQ ID NO: 281 - DNA, 1722 bp, synthetic construct
  source 1..1722: mol_type = other DNA; note = Trop2_h20Cl7hOKT3HoleLALAPA
caggtgcagctggtgcagtctggcgccgaagttaagaaacctggcgcctccgtgaaggtgtcctgtaaagccagcggcagcagcttcaccggctacaccatgaactgggtcaagcaggctcctggacagggactcgagtggatcggcatcatcaacccctaccagggcgacaccacctacaaccagaagttccagggcaaagtcaccatcaccgtggacaagagcaccagcaccgtgtacatggaactgtccagcctgagaagcgaggacaccgccgtgtactactgtgctagaggcgccggactgtactacttcgactattggggccagggaaccaccgtgaccgttagctctggacctgctggacttgtctccggacaggttcagctggttcagtctggcgccgaagtggctaaacctggcgcctccgtgaaggtgtcctgtaaagccagcggctacacattcacccggtacaccatgcactgggtcaagcaggctccaggacaaggcttggagtggatcggctacatcaaccctagccggggctacaccaattacgcccagaagttccagggcaaggccacactgaccaccgacaagagcacaagcaccgcctacatggaactgagcagcctgagaagcgaggacaccgccgtgtactactgtgcccggtactacgacgaccactacagcctggattattggggccagggcacaaccctgaccgtgtcatctgcttcgaccaagggcccatccgtgtttcctctggctcccagcagcaagtctacaagcggaggaacagccgctctgggctgcctggtcaaggattactttcccgagcctgtgaccgtgtcctggaattctggcgctctgacaagcggcgtgcacacctttccagctgtgctgcaaagcagcggcctgtactctctgagcagcgtggtcacagtgcctagctctagcctgggcacccagacctacatctgcaatgtgaaccacaagcctagcaacaccaaggtggacaagaaggtggaacccaagagctgcgataagacccacacatgtcctccatgtcctgctccagaagctgctggcggcccttctgtgttcctgtttcctccaaagcctaaggacaccctgatgatcagcagaacccctgaagtgacctgcgtggtggtggatgtgtctcacgaggaccccgaagtgaagttcaattggtacgtggacggcgtggaagtgcacaacgccaagaccaagcctagagaggaacagtacaacagcacctacagagtggtgtccgtgctgaccgtgctgcaccaggattggctgaacggcaaagagtacaagtgcaaggtgtccaacaaggccctggccgctcctatcgagaaaaccatcagcaaggccaagggccagcctagggaaccccaggtttgtacccttcctccaagccgggatgagctgaccaagaaccaggtgtccctgagctgtgccgtgaagggcttctaccccagcgacattgccgtggaatgggagagcaatggccagcctgagaacaactacaagacaacccctcctgtgctggacagcgacggctcattcttcctggtgagcaagctgacagtcgacaagtccagatggcagcagggcaacgtgttcagttgcagcgtgatgcacgaggccctgcacaaccactacacccagaagtccctgagcctgtctcctgga

SEQ ID NO: 282 - protein, 327 aa, synthetic construct
  source 1..327: note = Trop2_h20Cl7hOKT3L
DIQMTQSPSSLSASVGDRVTITCQASQDINKYLAWYQKKPGKAPKLLIHYTSNLQTGVPSRFSGSGSGTDFTFTISSLQPEDIATYYCLQYDDLFTFGQGTKLEIKGPAGLVSGDIQLTQSPSSLSASVGDRVTITCRASQSISYLNWYQQKPGKSPKRWIYDTSKLASGVPSRFSGSGSGTDYTLTISSMQPEDAATYYCQQWSSNPLTFGGGTKVEIKRTVAAPSVFIFPPSDEQLKSGTASVVCLLNNFYPREAKVQWKVDNALQSGNSQESVTEQDSKDSTYSLSSTLTLSKADYEKHKVYACEVTHQGLSSPVTKSFNRGEC

SEQ ID NO: 283 - DNA, 981 bp, synthetic construct
  source 1..981: mol_type = other DNA; note = Trop2_h20Cl7hOKT3L
gacatccagatgacacagagccctagcagcctgtctgccagcgtgggagacagagtgaccattacctgtcaggccagccaggacatcaacaagtacctggcctggtatcagaagaagcccggcaaggctcctaagctgctgatccactacaccagcaacctgcagacaggcgtgcccagcagattttctggcagcggctctggcaccgacttcaccttcaccataagcagcctgcagcctgaggatatcgccacctactactgcctgcagtacgacgacctgttcacctttggccagggcaccaagctggaaatcaaaggacctgctggacttgtctccggagacatccagctgacacagagcccttctagcctgtctgccagcgtgggcgacagagtgaccatcacatgtagagccagccagagcatcagctacctgaactggtatcagcagaagcccggcaagagccccaagcggtggatctacgatacaagcaagctggcctctggcgtgcccagcagattttctggctctggcagcggcaccgactacaccctgacaatcagcagcatgcagcctgaggatgccgccacctactactgccagcagtggtccagcaatcccctgacatttggcggaggcaccaaggtggaaatcaagcgtacggtggccgctcccagcgtgttcatcttcccacctagcgacgagcagctgaagtccggcacagcctctgtcgtgtgcctgctgaacaacttctacccccgcgaggccaaagtgcagtggaaggtggacaacgccctgcagagcggcaacagccaggaaagcgtgaccgagcaggacagcaaggactccacctacagcctgagcagcaccctgacactgagcaaggccgactacgagaagcacaaggtgtacgcctgcgaagtgacccaccagggcctgtctagccccgtgaccaagagcttcaaccggggcgagtgt

SEQ ID NO: 284 - protein, 574 aa, synthetic construct
  source 1..574: note = Trop2_h20Cl5hOKT3HoleLALAPA
QVQLVQSGAEVKKPGASVKVSCKASGSSFTGYTMNWVKQAPGQGLEWIGIINPYQGDTTYNQKFQGKVTITVDKSTSTVYMELSSLRSEDTAVYYCARGAGLYYFDYWGQGTTVTVSSASTRKAGGQVQLVQSGAEVAKPGASVKVSCKASGYTFTRYTMHWVKQAPGQGLEWIGYINPSRGYTNYAQKFQGKATLTTDKSTSTAYMELSSLRSEDTAVYYCARYYDDHYSLDYWGQGTTLTVSSASTKGPSVFPLAPSSKSTSGGTAALGCLVKDYFPEPVTVSWNSGALTSGVHTFPAVLQSSGLYSLSSVVTVPSSSLGTQTYICNVNHKPSNTKVDKKVEPKSCDKTHTCPPCPAPEAAGGPSVFLFPPKPKDTLMISRTPEVTCVVVDVSHEDPEVKFNWYVDGVEVHNAKTKPREEQYNSTYRVVSVLTVLHQDWLNGKEYKCKVSNKALAAPIEKTISKAKGQPREPQVCTLPPSRDELTKNQVSLSCAVKGFYPSDIAVEWESNGQPENNYKTTPPVLDSDGSFFLVSKLTVDKSRWQQGNVFSCSVMHEALHNHYTQKSLSLSPG

SEQ ID NO: 285 - DNA, 1722 bp, synthetic construct
  source 1..1722: mol_type = other DNA; note = Trop2_h20Cl5hOKT3HoleLALAPA
caggtgcagctggtgcagtctggcgccgaagttaagaaacctggcgcctccgtgaaggtgtcctgtaaagccagcggcagcagcttcaccggctacaccatgaactgggtcaagcaggctcctggacagggactcgagtggatcggcatcatcaacccctaccagggcgacaccacctacaaccagaagttccagggcaaagtcaccatcaccgtggacaagagcaccagcaccgtgtacatggaactgtccagcctgagaagcgaggacaccgccgtgtactactgtgctagaggcgccggactgtactacttcgactattggggccagggaaccaccgtgaccgttagctctgctagcacacggaaggctggcggacaggttcagctggttcagtctggcgccgaagtggctaaacctggcgcctccgtgaaggtgtcctgtaaagccagcggctacacattcacccggtacaccatgcactgggtcaagcaggctccaggacaaggcttggagtggatcggctacatcaaccctagccggggctacaccaattacgcccagaagttccagggcaaggccacactgaccaccgacaagagcacaagcaccgcctacatggaactgagcagcctgagaagcgaggacaccgccgtgtactactgtgcccggtactacgacgaccactacagcctggattattggggccagggcacaaccctgaccgtgtcatctgcttcgaccaagggcccatccgtgtttcctctggctcccagcagcaagtctacaagcggaggaacagccgctctgggctgcctggtcaaggattactttcccgagcctgtgaccgtgtcctggaattctggcgctctgacaagcggcgtgcacacctttccagctgtgctgcaaagcagcggcctgtactctctgagcagcgtggtcacagtgcctagctctagcctgggcacccagacctacatctgcaatgtgaaccacaagcctagcaacaccaaggtggacaagaaggtggaacccaagagctgcgataagacccacacatgtcctccatgtcctgctccagaagctgctggcggcccttctgtgttcctgtttcctccaaagcctaaggacaccctgatgatcagcagaacccctgaagtgacctgcgtggtggtggatgtgtctcacgaggaccccgaagtgaagttcaattggtacgtggacggcgtggaagtgcacaacgccaagaccaagcctagagaggaacagtacaacagcacctacagagtggtgtccgtgctgaccgtgctgcaccaggattggctgaacggcaaagagtacaagtgcaaggtgtccaacaaggccctggccgctcctatcgagaaaaccatcagcaaggccaagggccagcctagggaaccccaggtttgtacccttcctccaagccgggatgagctgaccaagaaccaggtgtccctgagctgtgccgtgaagggcttctaccccagcgacattgccgtggaatgggagagcaatggccagcctgagaacaactacaagacaacccctcctgtgctggacagcgacggctcattcttcctggtgagcaagctgacagtcgacaagtccagatggcagcagggcaacgtgttcagttgcagcgtgatgcacgaggccctgcacaaccactacacccagaagtccctgagcctgtctcctgga

SEQ ID NO: 286 - protein, 573 aa, synthetic construct
  source 1..573: note = Trop2_h20Cl8hOKT3HoleLALAPA
QVQLVQSGAEVKKPGASVKVSCKASGSSFTGYTMNWVKQAPGQGLEWIGIINPYQGDTTYNQKFQGKVTITVDKSTSTVYMELSSLRSEDTAVYYCARGAGLYYFDYWGQGTTVTVSSASTRKAGQVQLVQSGAEVAKPGASVKVSCKASGYTFTRYTMHWVKQAPGQGLEWIGYINPSRGYTNYAQKFQGKATLTTDKSTSTAYMELSSLRSEDTAVYYCARYYDDHYSLDYWGQGTTLTVSSASTKGPSVFPLAPSSKSTSGGTAALGCLVKDYFPEPVTVSWNSGALTSGVHTFPAVLQSSGLYSLSSVVTVPSSSLGTQTYICNVNHKPSNTKVDKKVEPKSCDKTHTCPPCPAPEAAGGPSVFLFPPKPKDTLMISRTPEVTCVVVDVSHEDPEVKFNWYVDGVEVHNAKTKPREEQYNSTYRVVSVLTVLHQDWLNGKEYKCKVSNKALAAPIEKTISKAKGQPREPQVCTLPPSRDELTKNQVSLSCAVKGFYPSDIAVEWESNGQPENNYKTTPPVLDSDGSFFLVSKLTVDKSRWQQGNVFSCSVMHEALHNHYTQKSLSLSPG

SEQ ID NO: 287 - DNA, 1719 bp, synthetic construct
  source 1..1719: mol_type = other DNA; note = Trop2_h20Cl8hOKT3HoleLALAPA
caggtgcagctggtgcagtctggcgccgaagttaagaaacctggcgcctccgtgaaggtgtcctgtaaagccagcggcagcagcttcaccggctacaccatgaactgggtcaagcaggctcctggacagggactcgagtggatcggcatcatcaacccctaccagggcgacaccacctacaaccagaagttccagggcaaagtcaccatcaccgtggacaagagcaccagcaccgtgtacatggaactgtccagcctgagaagcgaggacaccgccgtgtactactgtgctagaggcgccggactgtactacttcgactattggggccagggaaccaccgtgaccgttagctctgctagcacacggaaggctggccaggttcagctggttcagtctggcgccgaagtggctaaacctggcgcctccgtgaaggtgtcctgtaaagccagcggctacacattcacccggtacaccatgcactgggtcaagcaggctccaggacaaggcttggagtggatcggctacatcaaccctagccggggctacaccaattacgcccagaagttccagggcaaggccacactgaccaccgacaagagcacaagcaccgcctacatggaactgagcagcctgagaagcgaggacaccgccgtgtactactgtgcccggtactacgacgaccactacagcctggattattggggccagggcacaaccctgaccgtgtcatctgcttcgaccaagggcccatccgtgtttcctctggctcccagcagcaagtctacaagcggaggaacagccgctctgggctgcctggtcaaggattactttcccgagcctgtgaccgtgtcctggaattctggcgctctgacaagcggcgtgcacacctttccagctgtgctgcaaagcagcggcctgtactctctgagcagcgtggtcacagtgcctagctctagcctgggcacccagacctacatctgcaatgtgaaccacaagcctagcaacaccaaggtggacaagaaggtggaacccaagagctgcgataagacccacacatgtcctccatgtcctgctccagaagctgctggcggcccttctgtgttcctgtttcctccaaagcctaaggacaccctgatgatcagcagaacccctgaagtgacctgcgtggtggtggatgtgtctcacgaggaccccgaagtgaagttcaattggtacgtggacggcgtggaagtgcacaacgccaagaccaagcctagagaggaacagtacaacagcacctacagagtggtgtccgtgctgaccgtgctgcaccaggattggctgaacggcaaagagtacaagtgcaaggtgtccaacaaggccctggccgctcctatcgagaaaaccatcagcaaggccaagggccagcctagggaaccccaggtttgtacccttcctccaagccgggatgagctgaccaagaaccaggtgtccctgagctgtgccgtgaagggcttctaccccagcgacattgccgtggaatgggagagcaatggccagcctgagaacaactacaagacaacccctcctgtgctggacagcgacggctcattcttcctggtgagcaagctgacagtcgacaagtccagatggcagcagggcaacgtgttcagttgcagcgtgatgcacgaggccctgcacaaccactacacccagaagtccctgagcctgtctcctgga

SEQ ID NO: 288 - protein, 573 aa, synthetic construct
  source 1..573: note = Trop2_h20Cl9hOKT3HoleLALAPA
QVQLVQSGAEVKKPGASVKVSCKASGSSFTGYTMNWVKQAPGQGLEWIGIINPYQGDTTYNQKFQGKVTITVDKSTSTVYMELSSLRSEDTAVYYCARGAGLYYFDYWGQGTTVTVSSSTRKAGGQVQLVQSGAEVAKPGASVKVSCKASGYTFTRYTMHWVKQAPGQGLEWIGYINPSRGYTNYAQKFQGKATLTTDKSTSTAYMELSSLRSEDTAVYYCARYYDDHYSLDYWGQGTTLTVSSASTKGPSVFPLAPSSKSTSGGTAALGCLVKDYFPEPVTVSWNSGALTSGVHTFPAVLQSSGLYSLSSVVTVPSSSLGTQTYICNVNHKPSNTKVDKKVEPKSCDKTHTCPPCPAPEAAGGPSVFLFPPKPKDTLMISRTPEVTCVVVDVSHEDPEVKFNWYVDGVEVHNAKTKPREEQYNSTYRVVSVLTVLHQDWLNGKEYKCKVSNKALAAPIEKTISKAKGQPREPQVCTLPPSRDELTKNQVSLSCAVKGFYPSDIAVEWESNGQPENNYKTTPPVLDSDGSFFLVSKLTVDKSRWQQGNVFSCSVMHEALHNHYTQKSLSLSPG

SEQ ID NO: 289 - DNA, 1719 bp, synthetic construct
  source 1..1719: mol_type = other DNA; note = Trop2_h20Cl9hOKT3HoleLALAPA
caggtgcagctggtgcagtctggcgccgaagttaagaaacctggcgcctccgtgaaggtgtcctgtaaagccagcggcagcagcttcaccggctacaccatgaactgggtcaagcaggctcctggacagggactcgagtggatcggcatcatcaacccctaccagggcgacaccacctacaaccagaagttccagggcaaagtcaccatcaccgtggacaagagcaccagcaccgtgtacatggaactgtccagcctgagaagcgaggacaccgccgtgtactactgtgctagaggcgccggactgtactacttcgactattggggccagggaaccaccgtgaccgttagctctagcacgcgtaaggctggcggacaggttcagctggttcagtctggcgccgaagtggctaaacctggcgcctccgtgaaggtgtcctgtaaagccagcggctacacattcacccggtacaccatgcactgggtcaagcaggctccaggacaaggcttggagtggatcggctacatcaaccctagccggggctacaccaattacgcccagaagttccagggcaaggccacactgaccaccgacaagagcacaagcaccgcctacatggaactgagcagcctgagaagcgaggacaccgccgtgtactactgtgcccggtactacgacgaccactacagcctggattattggggccagggcacaaccctgaccgtgtcatctgcttcgaccaagggcccatccgtgtttcctctggctcccagcagcaagtctacaagcggaggaacagccgctctgggctgcctggtcaaggattactttcccgagcctgtgaccgtgtcctggaattctggcgctctgacaagcggcgtgcacacctttccagctgtgctgcaaagcagcggcctgtactctctgagcagcgtggtcacagtgcctagctctagcctgggcacccagacctacatctgcaatgtgaaccacaagcctagcaacaccaaggtggacaagaaggtggaacccaagagctgcgataagacccacacatgtcctccatgtcctgctccagaagctgctggcggcccttctgtgttcctgtttcctccaaagcctaaggacaccctgatgatcagcagaacccctgaagtgacctgcgtggtggtggatgtgtctcacgaggaccccgaagtgaagttcaattggtacgtggacggcgtggaagtgcacaacgccaagaccaagcctagagaggaacagtacaacagcacctacagagtggtgtccgtgctgaccgtgctgcaccaggattggctgaacggcaaagagtacaagtgcaaggtgtccaacaaggccctggccgctcctatcgagaaaaccatcagcaaggccaagggccagcctagggaaccccaggtttgtacccttcctccaagccgggatgagctgaccaagaaccaggtgtccctgagctgtgccgtgaagggcttctaccccagcgacattgccgtggaatgggagagcaatggccagcctgagaacaactacaagacaacccctcctgtgctggacagcgacggctcattcttcctggtgagcaagctgacagtcgacaagtccagatggcagcagggcaacgtgttcagttgcagcgtgatgcacgaggccctgcacaaccactacacccagaagtccctgagcctgtctcctgga

SEQ ID NO: 290 - protein, 327 aa, synthetic construct
  source 1..327: note = Trop2_h20Cl5hOKT3L
DIQMTQSPSSLSASVGDRVTITCQASQDINKYLAWYQKKPGKAPKLLIHYTSNLQTGVPSRFSGSGSGTDFTFTISSLQPEDIATYYCLQYDDLFTFGQGTKLEIKASTRKAGGDIQLTQSPSSLSASVGDRVTITCRASQSISYLNWYQQKPGKSPKRWIYDTSKLASGVPSRFSGSGSGTDYTLTISSMQPEDAATYYCQQWSSNPLTFGGGTKVEIKRTVAAPSVFIFPPSDEQLKSGTASVVCLLNNFYPREAKVQWKVDNALQSGNSQESVTEQDSKDSTYSLSSTLTLSKADYEKHKVYACEVTHQGLSSPVTKSFNRGEC

SEQ ID NO: 291 - DNA, 981 bp, synthetic construct
  source 1..981: mol_type = other DNA; note = Trop2_h20Cl5hOKT3L
gacatccagatgacacagagccctagcagcctgtctgccagcgtgggagacagagtgaccattacctgtcaggccagccaggacatcaacaagtacctggcctggtatcagaagaagcccggcaaggctcctaagctgctgatccactacaccagcaacctgcagacaggcgtgcccagcagattttctggcagcggctctggcaccgacttcaccttcaccataagcagcctgcagcctgaggatatcgccacctactactgcctgcagtacgacgacctgttcacctttggccagggcaccaagctggaaatcaaagctagcacacggaaggctggcggagacatccagctgacacagagcccttctagcctgtctgccagcgtgggcgacagagtgaccatcacatgtagagccagccagagcatcagctacctgaactggtatcagcagaagcccggcaagagccccaagcggtggatctacgatacaagcaagctggcctctggcgtgcccagcagattttctggctctggcagcggcaccgactacaccctgacaatcagcagcatgcagcctgaggatgccgccacctactactgccagcagtggtccagcaatcccctgacatttggcggaggcaccaaggtggaaatcaagcgtacggtggccgctcccagcgtgttcatcttcccacctagcgacgagcagctgaagtccggcacagcctctgtcgtgtgcctgctgaacaacttctacccccgcgaggccaaagtgcagtggaaggtggacaacgccctgcagagcggcaacagccaggaaagcgtgaccgagcaggacagcaaggactccacctacagcctgagcagcaccctgacactgagcaaggccgactacgagaagcacaaggtgtacgcctgcgaagtgacccaccagggcctgtctagccccgtgaccaagagcttcaaccggggcgagtgt

SEQ ID NO: 292 - protein, 326 aa, synthetic construct
  source 1..326: note = Trop2_h20Cl8hOKT3L
DIQMTQSPSSLSASVGDRVTITCQASQDINKYLAWYQKKPGKAPKLLIHYTSNLQTGVPSRFSGSGSGTDFTFTISSLQPEDIATYYCLQYDDLFTFGQGTKLEIKASTRKAGDIQLTQSPSSLSASVGDRVTITCRASQSISYLNWYQQKPGKSPKRWIYDTSKLASGVPSRFSGSGSGTDYTLTISSMQPEDAATYYCQQWSSNPLTFGGGTKVEIKRTVAAPSVFIFPPSDEQLKSGTASVVCLLNNFYPREAKVQWKVDNALQSGNSQESVTEQDSKDSTYSLSSTLTLSKADYEKHKVYACEVTHQGLSSPVTKSFNRGEC

SEQ ID NO: 293 - DNA, 978 bp, synthetic construct
  source 1..978: mol_type = other DNA; note = Trop2_h20Cl8hOKT3L
gacatccagatgacacagagccctagcagcctgtctgccagcgtgggagacagagtgaccattacctgtcaggccagccaggacatcaacaagtacctggcctggtatcagaagaagcccggcaaggctcctaagctgctgatccactacaccagcaacctgcagacaggcgtgcccagcagattttctggcagcggctctggcaccgacttcaccttcaccataagcagcctgcagcctgaggatatcgccacctactactgcctgcagtacgacgacctgttcacctttggccagggcaccaagctggaaatcaaagctagcacacggaaggctggcgacatccagctgacacagagcccttctagcctgtctgccagcgtgggcgacagagtgaccatcacatgtagagccagccagagcatcagctacctgaactggtatcagcagaagcccggcaagagccccaagcggtggatctacgatacaagcaagctggcctctggcgtgcccagcagattttctggctctggcagcggcaccgactacaccctgacaatcagcagcatgcagcctgaggatgccgccacctactactgccagcagtggtccagcaatcccctgacatttggcggaggcaccaaggtggaaatcaagcgtacggtggccgctcccagcgtgttcatcttcccacctagcgacgagcagctgaagtccggcacagcctctgtcgtgtgcctgctgaacaacttctacccccgcgaggccaaagtgcagtggaaggtggacaacgccctgcagagcggcaacagccaggaaagcgtgaccgagcaggacagcaaggactccacctacagcctgagcagcaccctgacactgagcaaggccgactacgagaagcacaaggtgtacgcctgcgaagtgacccaccagggcctgtctagccccgtgaccaagagcttcaaccggggcgagtgt

SEQ ID NO: 294 - protein, 326 aa, synthetic construct
  source 1..326: note = Trop2_h20Cl9hOKT3L
DIQMTQSPSSLSASVGDRVTITCQASQDINKYLAWYQKKPGKAPKLLIHYTSNLQTGVPSRFSGSGSGTDFTFTISSLQPEDIATYYCLQYDDLFTFGQGTKLEIKSTRKAGGDIQLTQSPSSLSASVGDRVTITCRASQSISYLNWYQQKPGKSPKRWIYDTSKLASGVPSRFSGSGSGTDYTLTISSMQPEDAATYYCQQWSSNPLTFGGGTKVEIKRTVAAPSVFIFPPSDEQLKSGTASVVCLLNNFYPREAKVQWKVDNALQSGNSQESVTEQDSKDSTYSLSSTLTLSKADYEKHKVYACEVTHQGLSSPVTKSFNRGEC

SEQ ID NO: 295 - DNA, 978 bp, synthetic construct
  source 1..978: mol_type = other DNA; note = Trop2_h20Cl9hOKT3L
gacatccagatgacacagagccctagcagcctgtctgccagcgtgggagacagagtgaccattacctgtcaggccagccaggacatcaacaagtacctggcctggtatcagaagaagcccggcaaggctcctaagctgctgatccactacaccagcaacctgcagacaggcgtgcccagcagattttctggcagcggctctggcaccgacttcaccttcaccataagcagcctgcagcctgaggatatcgccacctactactgcctgcagtacgacgacctgttcacctttggccagggcaccaagctggaaatcaaaagcacgcgtaaggctggcggagacatccagctgacacagagcccttctagcctgtctgccagcgtgggcgacagagtgaccatcacatgtagagccagccagagcatcagctacctgaactggtatcagcagaagcccggcaagagccccaagcggtggatctacgatacaagcaagctggcctctggcgtgcccagcagattttctggctctggcagcggcaccgactacaccctgacaatcagcagcatgcagcctgaggatgccgccacctactactgccagcagtggtccagcaatcccctgacatttggcggaggcaccaaggtggaaatcaagcgtacggtggccgctcccagcgtgttcatcttcccacctagcgacgagcagctgaagtccggcacagcctctgtcgtgtgcctgctgaacaacttctacccccgcgaggccaaagtgcagtggaaggtggacaacgccctgcagagcggcaacagccaggaaagcgtgaccgagcaggacagcaaggactccacctacagcctgagcagcaccctgacactgagcaaggccgactacgagaagcacaaggtgtacgcctgcgaagtgacccaccagggcctgtctagccccgtgaccaagagcttcaaccggggcgagtgt

SEQ ID NO: 296 - protein, 726 aa, synthetic construct
  source 1..726: note = cMetSTARknobLALAPA
DIVMTQSPDSLAVSLGERATINCKSSQSLLYTSSQKNYLAWYQQKPGQPPKLLIYWASTRESGVPDRFSGSGSGTDFTLTISSLQAEDVAVYYCQQYYAYPWTFGGGTKLEIKGGSSGDIVMTQSPDSLAVSLGERATINCKSSQSLLYTSSQKNYLAWYQQKPGQPPKLLIYWASTRESGVPDRFSGSGSGTDFTLTISSLQAEDVAVYYCQQYYAYPWTFGGGTKLEIKGGGGSGGSGSGGGGSASGSGQVQLVQSGAEVVKPGASVKLSCKASGYTFTSYWLHWVRQAPGQGLEWVGMIDPSNSDTRFNPNFKDRVTITADTSTSTAYMELSSLRSEDTAVYYCATYKSYVSPLDYWGQGTSVTVSSGGSSGQVQLVQSGAEVVKPGASVKLSCKASGYTFTSYWLHWVRQAPGQGLEWVGMIDPSNSDTRFNPNFKDRVTITADTSTSTAYMELSSLRSEDTAVYYCATYKSYVSPLDYWGQGTSVTVSSASGGSGDKTHTCPPCPAPEAAGGPSVFLFPPKPKDTLMISRTPEVTCVVVDVSHEDPEVKFNWYVDGVEVHNAKTKPREEQYNSTYRVVSVLTVLHQDWLNGKEYKCKVSNKALAAPIEKTISKAKGQPREPQVYTLPPCRDELTKNQVSLWCLVKGFYPSDIAVEWESNGQPENNYKTTPPVLDSDGSFFLYSKLTVDKSRWQQGNVFSCSVMHEALHNHYTQKSLSLSPG

SEQ ID NO: 297 - DNA, 2178 bp, synthetic construct
  source 1..2178: mol_type = other DNA; note = cMetSTARknobLALAPA
gacatcgtgatgacacagagccctgatagcctggccgtgtctctgggagagagagccaccatcaactgcaagagcagccagagcctgctgtacacctccagccagaagaactacctggcctggtatcagcagaagcccggccagcctcctaagctgctgatctactgggccagcaccagagaaagcggcgtgcccgatagattttctggctctggcagcggcaccgacttcaccctgacaatttctagcctgcaagccgaggacgtggccgtgtactactgccagcagtactacgcttacccctggacctttggcggaggcaccaagctggaaatcaagggcggatcttctggagatattgtgatgacccagtctccagactctctggctgtgtcccttggcgagcgggctactattaactgcaagtcctctcagtccctgctctacaccagctctcagaagaattatctcgcttggtatcaacaaaaaccggggcagccaccaaaactcctcatctattgggcctctaccagagaatctggcgtgccagacaggtttagcggcagcggctctggaaccgatttcacactgaccatcagctccctgcaggccgaagatgtggctgtctattattgtcagcagtattatgcctatccgtggaccttcggaggcgggacaaagctcgagatcaagggaggcggaggatctggcggatctggaagtggcggcggtggatctgcttctggctctggccaggtgcagcttgtgcagagcggagccgaagttgttaagccaggcgccagcgtgaagctgtcttgcaaggcctctggctatacctttacctcttattggctccattgggttcgacaagccccaggccagggtcttgagtgggttggcatgatcgatccctccaactccgataccagattcaatccgaatttcaaggaccgggtcacgatcacagccgatacctctacctccacagcttatatggaactgtctagcctgcgctccgaggatacagctgtgtattattgtgccacgtacaagtcctacgtcagcccactggactattggggacagggaacctccgtgaccgtgtcctctggaggcagctctggccaggttcagctggttcagtctggcgccgaggttgtgaaacctggcgcctctgtgaagctgagctgtaaagccagcggctacaccttcaccagctactggctgcactgggtccgacaggctccaggacaaggactggaatgggtcggaatgatcgaccccagcaacagcgacacccggttcaaccccaacttcaaggacagagtgaccatcaccgccgacaccagcacaagcaccgcctacatggaactgagcagcctgagaagcgaggacaccgccgtgtactactgcgccacctacaagagctacgtgtcccctctggattactggggccagggcacaagcgtgacagtgtcatctgcttctggcggctccggagataagacccacacatgtcctccatgtcctgctccagaagctgctggcggcccttctgtgttcctgtttcctccaaagcctaaggacaccctgatgatcagcagaacccctgaagtgacctgcgtggtggtggatgtgtctcacgaggaccccgaagtgaagttcaattggtacgtggacggcgtggaagtgcacaacgccaagaccaagcctagagaggaacagtacaacagcacctacagagtggtgtccgtgctgaccgtgctgcaccaggattggctgaacggcaaagagtacaagtgcaaggtgtccaacaaggccctggccgctcctatcgagaaaaccatcagcaaggccaagggccagcctagggaaccccaggtttacacccttcctccatgccgggatgagctgaccaagaaccaggtgtccctgtggtgtctcgtgaagggcttctaccccagcgacattgccgtggaatgggagagcaatggccagcctgagaacaactacaagacaacccctcctgtgctggacagcgacggctcattcttcctgtacagcaagctgacagtcgacaagtccagatggcagcagggcaacgtgttcagttgcagcgtgatgcacgaggccctgcacaaccactacacccagaagtccctgagcctgtctcctgga

SEQ ID NO: 298 - protein, 724 aa, synthetic construct
  source 1..724: note = Trop2_317STARknobLALAPA
EIVLTQSPATLSLSPGERATLSCRASQSVDSYGNSFLHWYQQKPGQAPRLLIYWASNRATGIPARFSGSGSGTDFTLTISSLEPEDFAVYYCQQNNEDLWTFGGGTKLEIKGGSSGEIVLTQSPATLSLSPGERATLSCRASQSVDSYGNSFLHWYQQKPGQAPRLLIYWASNRATGIPARFSGSGSGTDFTLTISSLEPEDFAVYYCQQNNEDLWTFGGGTKLEIKGGGGSGGSGSGGGGSASGSGEVQLVESGGGLVKPGGSLRLSCAASGFTFQNYAMSWVRQAPGKGLEWVSSISSDATYTYYADSVKGRFTISRDNAKNVLYLQMTSLRAEDTAVYYCARHPPSYYYAFDYWGQGTTLTVSSGGSSGEVQLVESGGGLVKPGGSLRLSCAASGFTFQNYAMSWVRQAPGKGLEWVSSISSDATYTYYADSVKGRFTISRDNAKNVLYLQMTSLRAEDTAVYYCARHPPSYYYAFDYWGQGTTLTVSSASGGSGDKTHTCPPCPAPEAAGGPSVFLFPPKPKDTLMISRTPEVTCVVVDVSHEDPEVKFNWYVDGVEVHNAKTKPREEQYNSTYRVVSVLTVLHQDWLNGKEYKCKVSNKALAAPIEKTISKAKGQPREPQVYTLPPCRDELTKNQVSLWCLVKGFYPSDIAVEWESNGQPENNYKTTPPVLDSDGSFFLYSKLTVDKSRWQQGNVFSCSVMHEALHNHYTQKSLSLSPG

SEQ ID NO: 299 - DNA, 2172 bp, synthetic construct
  source 1..2172: mol_type = other DNA; note = Trop2_317STARknobLALAPA
gagatcgtgctgacacagtctcccgccacactgtcactgtctccaggcgaaagagccacactgagctgtagagccagccagagcgtggacagctacggcaatagcttcctgcactggtatcagcagaagcccggacaggctcccagactgctgatctactgggccagcaatagagccacaggcatccccgccagattttctggctctggcagcggcaccgatttcaccctgaccataagcagcctggaacctgaggacttcgccgtgtactactgccagcagaacaacgaggacctgtggacctttggcggaggcaccaagctggaaatcaagggcggatcttctggagaaattgtgctgactcagagccctgccactctgtctcttagccctggcgagagagctaccctgtcttgcagagcctctcagtccgtggattcctacggcaactcttttctccattggtatcaacaaaagccggggcaagcccctcggctgctcatctattgggcttccaacagagccaccggaattccagccaggtttagcggctctggctccggcacagactttacactgacaatatctagcctcgagccagaggattttgccgtctattattgtcagcaaaacaatgaggatctctggacattcggaggcgggaccaagctcgagatcaagggaggcggaggatctggcggatctggaagtggcggcggtggatctgcttctggctctggcgaagtccagctggtggaaagcggcggaggtcttgtcaaacccggtggaagcctgagactgtcttgtgccgcttccgggttcacctttcagaattatgccatgtcttgggttcgacaagctcccggcaaaggattggagtgggtgtcctccatctcctccgatgccacatacacatattatgccgactccgtgaaaggccggttcacaatctccagagataatgccaagaatgtcctctacctccaaatgacatccctgcgcgccgaggacacagcagtgtattattgcgctcggcacccaccaagctactattacgcctttgattattggggacagggaacaaccctgaccgtgtcctctggaggcagctctggcgaggtgcagctggttgaatctggcggcggacttgtgaagcctggcggatctctgagactgagctgtgccgccagcggcttcacattccagaactacgccatgagctgggtccgacaggcccctggaaaaggccttgaatgggtgtccagcatcagcagcgacgccacctacacctactacgccgatagcgtgaagggcagattcaccatcagccgggacaacgccaagaacgtgctgtacctgcagatgaccagcctgagagccgaggataccgccgtgtactactgcgccagacatcctcctagctactactatgccttcgactactggggccagggcaccacactgacagtctcttctgcttctggcggctccggagataagacccacacatgtcctccatgtcctgctccagaagctgctggcggcccttctgtgttcctgtttcctccaaagcctaaggacaccctgatgatcagcagaacccctgaagtgacctgcgtggtggtggatgtgtctcacgaggaccccgaagtgaagttcaattggtacgtggacggcgtggaagtgcacaacgccaagaccaagcctagagaggaacagtacaacagcacctacagagtggtgtccgtgctgaccgtgctgcaccaggattggctgaacggcaaagagtacaagtgcaaggtgtccaacaaggccctggccgctcctatcgagaaaaccatcagcaaggccaagggccagcctagggaaccccaggtttacacccttcctccatgccgggatgagctgaccaagaaccaggtgtccctgtggtgtctcgtgaagggcttctaccccagcgacattgccgtggaatgggagagcaatggccagcctgagaacaactacaagacaacccctcctgtgctggacagcgacggctcattcttcctgtacagcaagctgacagtcgacaagtccagatggcagcagggcaacgtgttcagttgcagcgtgatgcacgaggccctgcacaaccactacacccagaagtccctgagcctgtctcctgga

SEQ ID NO: 300 - protein, 710 aa, synthetic construct
  source 1..710: note = Trop2_20STARknobLALAPA
DIQMTQSPSSLSASVGDRVTITCQASQDINKYLAWYQKKPGKAPKLLIHYTSNLQTGVPSRFSGSGSGTDFTFTISSLQPEDIATYYCLQYDDLFTFGQGTKLEIKGGSSGDIQMTQSPSSLSASVGDRVTITCQASQDINKYLAWYQKKPGKAPKLLIHYTSNLQTGVPSRFSGSGSGTDFTFTISSLQPEDIATYYCLQYDDLFTFGQGTKLEIKGGGGSGGSGSGGGGSASGSGQVQLVQSGAEVKKPGASVKVSCKASGSSFTGYTMNWVKQAPGQGLEWIGIINPYQGDTTYNQKFQGKVTITVDKSTSTVYMELSSLRSEDTAVYYCARGAGLYYFDYWGQGTTVTVSSGGSSGQVQLVQSGAEVKKPGASVKVSCKASGSSFTGYTMNWVKQAPGQGLEWIGIINPYQGDTTYNQKFQGKVTITVDKSTSTVYMELSSLRSEDTAVYYCARGAGLYYFDYWGQGTTVTVSSASGGSGDKTHTCPPCPAPEAAGGPSVFLFPPKPKDTLMISRTPEVTCVVVDVSHEDPEVKFNWYVDGVEVHNAKTKPREEQYNSTYRVVSVLTVLHQDWLNGKEYKCKVSNKALAAPIEKTISKAKGQPREPQVYTLPPCRDELTKNQVSLWCLVKGFYPSDIAVEWESNGQPENNYKTTPPVLDSDGSFFLYSKLTVDKSRWQQGNVFSCSVMHEALHNHYTQKSLSLSPG

SEQ ID NO: 301 - DNA, 2130 bp, synthetic construct
  source 1..2130: mol_type = other DNA; note = Trop2_20STARknobLALAPA
gacatccagatgacacagagccctagcagcctgtctgccagcgtgggagacagagtgaccattacctgtcaggccagccaggacatcaacaagtacctggcctggtatcagaagaagcccggcaaggctcctaagctgctgatccactacaccagcaacctgcagacaggcgtgcccagcagattttctggcagcggctctggcaccgacttcaccttcaccataagcagcctgcagcctgaggatatcgccacctactactgcctgcagtacgacgacctgttcacctttggccagggcaccaagctggaaatcaaaggcggatcttctggagatattcagatgacccagtctccatccagcctgagcgcctctgtgggcgatagagtgacaatcacatgccaggcctctcaggatattaacaaatatctcgcttggtatcaaaagaaaccggggaaagctccaaagctcctcatccactatacctctaacctgcagacaggggtgccaagccggtttagcggatctggatctggcacagatttcacgtttacgataagctccctgcaaccagaggacattgccacgtattactgtctccagtatgatgacctctttacgttcggccagggaacaaagctcgagattaagggaggcggaggatctggcggatctggaagtggcggcggtggatctgcttctggctctggccaggtgcagctggtgcagtctggcgccgaagttaagaaacctggcgcctccgtgaaggtgtcctgtaaagccagcggcagcagcttcaccggctacaccatgaactgggtcaagcaggctcctggacagggactcgagtggatcggcatcatcaacccctaccagggcgacaccacctacaaccagaagttccagggcaaagtcaccatcaccgtggacaagagcaccagcaccgtgtacatggaactgtccagcctgagaagcgaggacaccgccgtgtactactgtgctagaggcgccggactgtactacttcgactattggggccagggaaccaccgtgaccgttagctctggaggcagctctggccaggttcagctggttcagtctggcgccgaagtgaagaaacctggcgcctctgtgaaggtgtcctgcaaggcctctggcagcagctttaccggctacaccatgaactgggtcaagcaggcccctggacagggactcgagtggatcggcatcatcaacccctaccagggcgacaccacctacaaccagaaattccagggcaaagtgaccatcaccgtggacaagagcaccagcaccgtgtacatggaactgagcagcctgagaagcgaggacaccgccgtgtactactgtgctagaggcgccggactgtactacttcgactattggggccagggcaccaccgtgacagttagctctgcttctggcggctccggagataagacccacacatgtcctccatgtcctgctccagaagctgctggcggcccttctgtgttcctgtttcctccaaagcctaaggacaccctgatgatcagcagaacccctgaagtgacctgcgtggtggtggatgtgtctcacgaggaccccgaagtgaagttcaattggtacgtggacggcgtggaagtgcacaacgccaagaccaagcctagagaggaacagtacaacagcacctacagagtggtgtccgtgctgaccgtgctgcaccaggattggctgaacggcaaagagtacaagtgcaaggtgtccaacaaggccctggccgctcctatcgagaaaaccatcagcaaggccaagggccagcctagggaaccccaggtttacacccttcctccatgccgggatgagctgaccaagaaccaggtgtccctgtggtgtctcgtgaagggcttctaccccagcgacattgccgtggaatgggagagcaatggccagcctgagaacaactacaagacaacccctcctgtgctggacagcgacggctcattcttcctgtacagcaagctgacagtcgacaagtccagatggcagcagggcaacgtgttcagttgcagcgtgatgcacgaggccctgcacaaccactacacccagaagtccctgagcctgtctcctgga

SEQ ID NO: 302 - protein, 327 aa, synthetic construct
  source 1..327: note = hrCD20_sshep12hOKT3L
EIQLTQSPSSLSASVGDRVTITCRASSSVSYIHWFQQKPGSAPKSLIYATSNLASGVPSRFSGSGSGTDYTLTISSLQPEDFATYYCQQWTSNPPTFGCGTKLEIKASTRKAGGDIQLTQSPSSLSASVGDRVTITCRASQSISYLNWYQQKPGKSPKRWIYDTSKLASGVPSRFSGSGSGTDYTLTISSMQPEDAATYYCQQWSSNPLTFGGGTKVEIKRTVAAPSVFIFPPSDEQLKSGTASVVCLLNNFYPREAKVQWKVDNALQSGNSQESVTEQDSKDSTYSLSSTLTLSKADYEKHKVYACEVTHQGLSSPVTKSFNRGEC

SEQ ID NO: 303 - DNA, 981 bp, synthetic construct
  source 1..981: mol_type = other DNA; note = hrCD20_sshep12hOKT3L
gagatccagctgacacagagcccttctagcctgtctgccagcgtgggcgacagagtgaccatcacatgtagagccagcagcagcgtgtcctatatccactggttccagcagaagcctggaagcgcccctaagtccctgatctatgccacaagcaacctggcctctggcgtgcccagcagattttctggcagcggctctggcaccgactacaccctgacaatcagctccctgcagcctgaggacttcgccacctactactgccagcagtggacaagcaaccctcctacatttggctgcggcaccaagctggaaatcaaggccagcacacggaaggctggcggagacatccagctgacacagagcccttctagcctgtctgccagcgtgggcgacagagtgaccatcacatgtagagccagccagagcatcagctacctgaactggtatcagcagaagcccggcaagagccccaagcggtggatctacgatacaagcaagctggcctctggcgtgcccagcagattttctggctctggcagcggcaccgactacaccctgacaatcagcagcatgcagcctgaggatgccgccacctactactgccagcagtggtccagcaatcccctgacatttggcggaggcaccaaggtggaaatcaagcgtacggtggccgctcccagcgtgttcatcttcccacctagcgacgagcagctgaagtccggcacagcctctgtcgtgtgcctgctgaacaacttctacccccgcgaggccaaagtgcagtggaaggtggacaacgccctgcagagcggcaacagccaggaaagcgtgaccgagcaggacagcaaggactccacctacagcctgagcagcaccctgacactgagcaaggccgactacgagaagcacaaggtgtacgcctgcgaagtgacccaccagggcctgtctagccccgtgaccaagagcttcaaccggggcgagtgt

SEQ ID NO: 304 - protein, 577 aa, synthetic construct
  source 1..577: note = hrCD20_sscl5hOKT3Hhole
QVQLVQPGAEVKKPGASVKMSCKASGYTFTSYNMHWVRQAPGRCLEWMGAIYPGSGDTSYSQKFQGKVTLTADKSTSTAYMELSSLESEDTAVYYCARSTYYGGDWYFNVWGAGTTVTVSAASTRKAGGQVQLVQSGAEVAKPGASVKVSCKASGYTFTRYTMHWVKQAPGQGLEWIGYINPSRGYTNYAQKFQGKATLTTDKSTSTAYMELSSLRSEDTAVYYCARYYDDHYSLDYWGQGTTLTVSSASTKGPSVFPLAPSSKSTSGGTAALGCLVKDYFPEPVTVSWNSGALTSGVHTFPAVLQSSGLYSLSSVVTVPSSSLGTQTYICNVNHKPSNTKVDKKVEPKSCDKTHTCPPCPAPELLGGPSVFLFPPKPKDTLMISRTPEVTCVVVDVSHEDPEVKFNWYVDGVEVHNAKTKPREEQYNSTYRVVSVLTVLHQDWLNGKEYKCKVSNKALPAPIEKTISKAKGQPREPQVCTLPPSRDELTKNQVSLSCAVKGFYPSDIAVEWESNGQPENNYKTTPPVLDSDGSFFLVSKLTVDKSRWQQGNVFSCSVMHEALHNHYTQKSLSLSPG

SEQ ID NO: 305 - DNA, 1731 bp, synthetic construct
  source 1..1731: mol_type = other DNA; note = hrCD20_sscl5hOKT3Hhole
caggttcagctggttcagcctggcgccgaagtgaaaaaacctggcgcctccgtgaagatgagctgcaaggccagcggctacaccttcaccagctacaacatgcactgggtccgacaggcccctggcagatgccttgaatggatgggcgccatctatcccggcagcggcgatacaagctacagccagaaattccagggcaaagtgaccctgaccgccgacaagagcacaagcaccgcctacatggaactgagcagcctggaaagcgaggacaccgccgtgtactactgtgccagaagcacctactacggcggcgactggtacttcaatgtgtggggagccggcaccaccgtgacagtttctgctgccagcacacggaaggctggcggacaggttcagctggttcagtctggcgccgaagtggctaaacctggcgcctccgtgaaggtgtcctgtaaagccagcggctacacattcacccggtacaccatgcactgggtcaagcaggctccaggacaaggcttggagtggatcggctacatcaaccctagccggggctacaccaattacgcccagaagttccagggcaaggccacactgaccaccgacaagagcacaagcaccgcctacatggaactgagcagcctgagaagcgaggacaccgccgtgtactactgtgcccggtactacgacgaccactacagcctggattattggggccagggcacaaccctgaccgtgtcatctgcttcgaccaagggcccatccgtgtttcctctggctcccagcagcaagtctacaagcggaggaacagccgctctgggctgcctggtcaaggattactttcccgagcctgtgaccgtgtcctggaattctggcgctctgacaagcggcgtgcacacctttccagctgtgctgcaaagcagcggcctgtactctctgagcagcgtggtcacagtgcctagctctagcctgggcacccagacctacatctgcaatgtgaaccacaagcctagcaacaccaaggtggacaagaaggtggaacccaagagctgcgataagacccacacatgtcctccatgtcctgctccagaactgctcggcggcccttctgtgttcctgtttcctccaaagcctaaggacaccctgatgatcagcagaacccctgaagtgacctgcgtggtggtggatgtgtctcacgaggaccccgaagtgaagttcaattggtacgtggacggcgtggaagtgcacaacgccaagaccaagcctagagaggaacagtacaacagcacctacagagtggtgtccgtgctgaccgtgctgcaccaggattggctgaacggcaaagagtacaagtgcaaggtgtccaacaaggccctgcctgctcctatcgagaaaaccatcagcaaggccaagggccagcctagggaaccccaggtttgtacccttcctccaagccgggatgagctgaccaagaaccaggtgtccctgagctgtgccgtgaagggcttctaccccagcgacattgccgtggaatgggagagcaatggccagcctgagaacaactacaagacaacccctcctgtgctggacagcgacggctcattcttcctggtgagcaagctgacagtcgacaagtccagatggcagcagggcaacgtgttcagttgcagcgtgatgcacgaggccctgcacaaccactacacccagaagtccctgagcctgtctcctgga

SEQ ID NO: 306 - protein, 577 aa, synthetic construct
  source 1..577: note = hrCD20_sscl5hOKT3HFc
QVQLVQPGAEVKKPGASVKMSCKASGYTFTSYNMHWVRQAPGRCLEWMGAIYPGSGDTSYSQKFQGKVTLTADKSTSTAYMELSSLESEDTAVYYCARSTYYGGDWYFNVWGAGTTVTVSAASTRKAGGQVQLVQSGAEVAKPGASVKVSCKASGYTFTRYTMHWVKQAPGQGLEWIGYINPSRGYTNYAQKFQGKATLTTDKSTSTAYMELSSLRSEDTAVYYCARYYDDHYSLDYWGQGTTLTVSSASTKGPSVFPLAPSSKSTSGGTAALGCLVKDYFPEPVTVSWNSGALTSGVHTFPAVLQSSGLYSLSSVVTVPSSSLGTQTYICNVNHKPSNTKVDKKVEPKSCDKTHTCPPCPAPELLGGPSVFLFPPKPKDTLMISRTPEVTCVVVDVSHEDPEVKFNWYVDGVEVHNAKTKPREEQYNSTYRVVSVLTVLHQDWLNGKEYKCKVSNKALPAPIEKTISKAKGQPREPQVYTLPPSRDELTKNQVSLTCLVKGFYPSDIAVEWESNGQPENNYKTTPPVLDSDGSFFLYSKLTVDKSRWQQGNVFSCSVMHEALHNHYTQKSLSLSPG

SEQ ID NO: 307 - DNA, 1731 bp, synthetic construct
  source 1..1731: mol_type = other DNA; note = hrCD20_sscl5hOKT3HFc
caggttcagctggttcagcctggcgccgaagtgaaaaaacctggcgcctccgtgaagatgagctgcaaggccagcggctacaccttcaccagctacaacatgcactgggtccgacaggcccctggcagatgccttgaatggatgggcgccatctatcccggcagcggcgatacaagctacagccagaaattccagggcaaagtgaccctgaccgccgacaagagcacaagcaccgcctacatggaactgagcagcctggaaagcgaggacaccgccgtgtactactgtgccagaagcacctactacggcggcgactggtacttcaatgtgtggggagccggcaccaccgtgacagtttctgctgccagcacacggaaggctggcggacaggttcagctggttcagtctggcgccgaagtggctaaacctggcgcctccgtgaaggtgtcctgtaaagccagcggctacacattcacccggtacaccatgcactgggtcaagcaggctccaggacaaggcttggagtggatcggctacatcaaccctagccggggctacaccaattacgcccagaagttccagggcaaggccacactgaccaccgacaagagcacaagcaccgcctacatggaactgagcagcctgagaagcgaggacaccgccgtgtactactgtgcccggtactacgacgaccactacagcctggattattggggccagggcacaaccctgaccgtgtcatctgcttcgaccaagggcccatccgtgtttcctctggctcccagcagcaagtctacaagcggaggaacagccgctctgggctgcctggtcaaggattactttcccgagcctgtgaccgtgtcctggaattctggcgctctgacaagcggcgtgcacacctttccagctgtgctgcaaagcagcggcctgtactctctgagcagcgtggtcacagtgcctagctctagcctgggcacccagacctacatctgcaatgtgaaccacaagcctagcaacaccaaggtggacaagaaggtggaacccaagagctgcgataagacccacacatgtcctccatgtcctgctccagaactgctcggcggcccttctgtgttcctgtttcctccaaagcctaaggacaccctgatgatcagcagaacccctgaagtgacctgcgtggtggtggatgtgtctcacgaggaccccgaagtgaagttcaattggtacgtggacggcgtggaagtgcacaacgccaagaccaagcctagagaggaacagtacaacagcacctacagagtggtgtccgtgctgaccgtgctgcaccaggattggctgaacggcaaagagtacaagtgcaaggtgtccaacaaggccctgcctgctcctatcgagaaaaccatcagcaaggccaagggccagcctagggaaccccaggtttacacccttcctccaagccgggatgagctgaccaagaaccaggtgtccctgacatgtctcgtgaagggcttctaccccagcgacattgccgtggaatgggagagcaatggccagcctgagaacaactacaagacaacccctcctgtgctggacagcgacggctcattcttcctgtacagcaagctgacagtcgacaagtccagatggcagcagggcaacgtgttcagttgcagcgtgatgcacgaggccctgcacaaccactacacccagaagtccctgagcctgtctcctgga

SEQ ID NO: 308 - protein, 324 aa, synthetic construct
EIQLTQSPSSLSASVGDRVTITCRASSSVSYIHWFQQKPGSAPKSLIYATSNLASGVPSRFSGSGSGTDYTLTISSLQPEDFATYYCQQWTSNPPTFGGGTKLEIKGGSGSDIQLTQSPSSLSASVGDRVTITCRASQSISYLNWYQQKPGKSPKRWIYDTSKLASGVPSRFSGSGSGTDYTLTISSMQPEDAATYYCQQWSSNPLTFGGGTKVEIKRTVAAPSVFIFPPSDEQLKSGTASVVCLLNNFYPREAKVQWKVDNALQSGNSQESVTEQDSKDSTYSLSSTLTLSKADYEKHKVYACEVTHQGLSSPVTKSFNRGEC

SEQ ID NO: 309 - DNA, 972 bp, synthetic construct
  source 1..972: mol_type = other DNA; note = hrCD20_GShOKT3L
gagatccagctgacacagagcccttctagcctgtctgccagcgtgggcgacagagtgaccatcacatgtagagccagcagcagcgtgtcctatatccactggttccagcagaagcctggaagcgcccctaagtccctgatctatgccacaagcaacctggcctctggcgtgcccagcagattttctggcagcggctctggcaccgactacaccctgacaatcagctccctgcagcctgaggacttcgccacctactactgccagcagtggacaagcaaccctcctacatttggcggaggcaccaagctggaaatcaagggcggctctggctctgacatccagctgacacagagcccttctagcctgtctgccagcgtgggcgacagagtgaccatcacatgtagagccagccagagcatcagctacctgaactggtatcagcagaagcccggcaagagccccaagcggtggatctacgatacaagcaagctggcctctggcgtgcccagcagattttctggctctggcagcggcaccgactacaccctgacaatcagcagcatgcagcctgaggatgccgccacctactactgccagcagtggtccagcaatcccctgacatttggcggaggcaccaaggtggaaatcaagcgtacggtggccgctcccagcgtgttcatcttcccacctagcgacgagcagctgaagtccggcacagcctctgtcgtgtgcctgctgaacaacttctacccccgcgaggccaaagtgcagtggaaggtggacaacgccctgcagagcggcaacagccaggaaagcgtgaccgagcaggacagcaaggactccacctacagcctgagcagcaccctgacactgagcaaggccgactacgagaagcacaaggtgtacgcctgcgaagtgacccaccagggcctgtctagccccgtgaccaagagcttcaaccggggcgagtgt

SEQ ID NO: 310 - protein, 574 aa, synthetic construct
  source 1..574: note = hrCD20_GShOKT3Hhole
QVQLVQPGAEVKKPGASVKMSCKASGYTFTSYNMHWVRQAPGRGLEWMGAIYPGSGDTSYSQKFQGKVTLTADKSTSTAYMELSSLESEDTAVYYCARSTYYGGDWYFNVWGAGTTVTVSAGGSGSQVQLVQSGAEVAKPGASVKVSCKASGYTFTRYTMHWVKQAPGQGLEWIGYINPSRGYTNYAQKFQGKATLTTDKSTSTAYMELSSLRSEDTAVYYCARYYDDHYSLDYWGQGTTLTVSSASTKGPSVFPLAPSSKSTSGGTAALGCLVKDYFPEPVTVSWNSGALTSGVHTFPAVLQSSGLYSLSSVVTVPSSSLGTQTYICNVNHKPSNTKVDKKVEPKSCDKTHTCPPCPAPELLGGPSVFLFPPKPKDTLMISRTPEVTCVVVDVSHEDPEVKFNWYVDGVEVHNAKTKPREEQYNSTYRVVSVLTVLHQDWLNGKEYKCKVSNKALPAPIEKTISKAKGQPREPQVCTLPPSRDELTKNQVSLSCAVKGFYPSDIAVEWESNGQPENNYKTTPPVLDSDGSFFLVSKLTVDKSRWQQGNVFSCSVMHEALHNHYTQKSLSLSPG

SEQ ID NO: 311 - DNA, 1722 bp, synthetic construct
  source 1..1722: mol_type = other DNA; note = hrCD20_GShOKT3Hhole
caggttcagctggttcagcctggcgccgaagtgaaaaaacctggcgcctccgtgaagatgagctgcaaggccagcggctacaccttcaccagctacaacatgcactgggtccgacaggcccctggcagaggacttgaatggatgggcgccatctatcccggcagcggcgatacaagctacagccagaaattccagggcaaagtgaccctgaccgccgacaagagcacaagcaccgcctacatggaactgagcagcctggaaagcgaggacaccgccgtgtactactgtgccagaagcacctactacggcggcgactggtacttcaatgtgtggggagccggcaccaccgtgacagtttctgctggcggctctggctctcaggttcagctggttcagtctggcgccgaagtggctaaacctggcgcctccgtgaaggtgtcctgtaaagccagcggctacacattcacccggtacaccatgcactgggtcaagcaggctccaggacaaggcttggagtggatcggctacatcaaccctagccggggctacaccaattacgcccagaagttccagggcaaggccacactgaccaccgacaagagcacaagcaccgcctacatggaactgagcagcctgagaagcgaggacaccgccgtgtactactgtgcccggtactacgacgaccactacagcctggattattggggccagggcacaaccctgaccgtgtcatctgcttcgaccaagggcccatccgtgtttcctctggctcccagcagcaagtctacaagcggaggaacagccgctctgggctgcctggtcaaggattactttcccgagcctgtgaccgtgtcctggaattctggcgctctgacaagcggcgtgcacacctttccagctgtgctgcaaagcagcggcctgtactctctgagcagcgtggtcacagtgcctagctctagcctgggcacccagacctacatctgcaatgtgaaccacaagcctagcaacaccaaggtggacaagaaggtggaacccaagagctgcgataagacccacacatgtcctccatgtcctgctccagaactgctcggcggcccttctgtgttcctgtttcctccaaagcctaaggacaccctgatgatcagcagaacccctgaagtgacctgcgtggtggtggatgtgtctcacgaggaccccgaagtgaagttcaattggtacgtggacggcgtggaagtgcacaacgccaagaccaagcctagagaggaacagtacaacagcacctacagagtggtgtccgtgctgaccgtgctgcaccaggattggctgaacggcaaagagtacaagtgcaaggtgtccaacaaggccctgcctgctcctatcgagaaaaccatcagcaaggccaagggccagcctagggaaccccaggtttgtacccttcctccaagccgggatgagctgaccaagaaccaggtgtccctgagctgtgccgtgaagggcttctaccccagcgacattgccgtggaatgggagagcaatggccagcctgagaacaactacaagacaacccctcctgtgctggacagcgacggctcattcttcctggtgagcaagctgacagtcgacaagtccagatggcagcagggcaacgtgttcagttgcagcgtgatgcacgaggccctgcacaaccactacacccagaagtccctgagcctgtctcctgga

SEQ ID NO: 312 - protein, 574 aa, synthetic construct
  source 1..574: note = hrCD20_GShOKT3HFc
QVQLVQPGAEVKKPGASVKMSCKASGYTFTSYNMHWVRQAPGRGLEWMGAIYPGSGDTSYSQKFQGKVTLTADKSTSTAYMELSSLESEDTAVYYCARSTYYGGDWYFNVWGAGTTVTVSAGGSGSQVQLVQSGAEVAKPGASVKVSCKASGYTFTRYTMHWVKQAPGQGLEWIGYINPSRGYTNYAQKFQGKATLTTDKSTSTAYMELSSLRSEDTAVYYCARYYDDHYSLDYWGQGTTLTVSSASTKGPSVFPLAPSSKSTSGGTAALGCLVKDYFPEPVTVSWNSGALTSGVHTFPAVLQSSGLYSLSSVVTVPSSSLGTQTYICNVNHKPSNTKVDKKVEPKSCDKTHTCPPCPAPELLGGPSVFLFPPKPKDTLMISRTPEVTCVVVDVSHEDPEVKFNWYVDGVEVHNAKTKPREEQYNSTYRVVSVLTVLHQDWLNGKEYKCKVSNKALPAPIEKTISKAKGQPREPQVYTLPPSRDELTKNQVSLTCLVKGFYPSDIAVEWESNGQPENNYKTTPPVLDSDGSFFLYSKLTVDKSRWQQGNVFSCSVMHEALHNHYTQKSLSLSPG

SEQ ID NO: 313 - DNA, 1722 bp, synthetic construct
  source 1..1722: mol_type = other DNA; note = hrCD20_GShOKT3HFc
caggttcagctggttcagcctggcgccgaagtgaaaaaacctggcgcctccgtgaagatgagctgcaaggccagcggctacaccttcaccagctacaacatgcactgggtccgacaggcccctggcagaggacttgaatggatgggcgccatctatcccggcagcggcgatacaagctacagccagaaattccagggcaaagtgaccctgaccgccgacaagagcacaagcaccgcctacatggaactgagcagcctggaaagcgaggacaccgccgtgtactactgtgccagaagcacctactacggcggcgactggtacttcaatgtgtggggagccggcaccaccgtgacagtttctgctggcggctctggctctcaggttcagctggttcagtctggcgccgaagtggctaaacctggcgcctccgtgaaggtgtcctgtaaagccagcggctacacattcacccggtacaccatgcactgggtcaagcaggctccaggacaaggcttggagtggatcggctacatcaaccctagccggggctacaccaattacgcccagaagttccagggcaaggccacactgaccaccgacaagagcacaagcaccgcctacatggaactgagcagcctgagaagcgaggacaccgccgtgtactactgtgcccggtactacgacgaccactacagcctggattattggggccagggcacaaccctgaccgtgtcatctgcttcgaccaagggcccatccgtgtttcctctggctcccagcagcaagtctacaagcggaggaacagccgctctgggctgcctggtcaaggattactttcccgagcctgtgaccgtgtcctggaattctggcgctctgacaagcggcgtgcacacctttccagctgtgctgcaaagcagcggcctgtactctctgagcagcgtggtcacagtgcctagctctagcctgggcacccagacctacatctgcaatgtgaaccacaagcctagcaacaccaaggtggacaagaaggtggaacccaagagctgcgataagacccacacatgtcctccatgtcctgctccagaactgctcggcggcccttctgtgttcctgtttcctccaaagcctaaggacaccctgatgatcagcagaacccctgaagtgacctgcgtggtggtggatgtgtctcacgaggaccccgaagtgaagttcaattggtacgtggacggcgtggaagtgcacaacgccaagaccaagcctagagaggaacagtacaacagcacctacagagtggtgtccgtgctgaccgtgctgcaccaggattggctgaacggcaaagagtacaagtgcaaggtgtccaacaaggccctgcctgctcctatcgagaaaaccatcagcaaggccaagggccagcctagggaaccccaggtttacacccttcctccaagccgggatgagctgaccaagaaccaggtgtccctgacatgtctcgtgaagggcttctaccccagcgacattgccgtggaatgggagagcaatggccagcctgagaacaactacaagacaacccctcctgtgctggacagcgacggctcattcttcctgtacagcaagctgacagtcgacaagtccagatggcagcagggcaacgtgttcagttgcagcgtgatgcacgaggccctgcacaaccactacacccagaagtccctgagcctgtctcctgga

SEQ ID NO: 314 - protein, 479 aa, synthetic construct
  source 1..479: note = hrCD20scFvFcknob
EIQLTQSPSSLSASVGDRVTITCRASSSVSYIHWFQQKPGSAPKSLIYATSNLASGVPSRFSGSGSGTDYTLTISSLQPEDFATYYCQQWTSNPPTFGGGTKLEIKGGGGSGGSGSGGGGSASGSGQVQLVQPGAEVKKPGASVKMSCKASGYTFTSYNMHWVRQAPGRGLEWMGAIYPGSGDTSYSQKFQGKVTLTADKSTSTAYMELSSLESEDTAVYYCARSTYYGGDWYFNVWGAGTTVTVSAASGGSGDKTHTCPPCPAPELLGGPSVFLFPPKPKDTLMISRTPEVTCVVVDVSHEDPEVKFNWYVDGVEVHNAKTKPREEQYNSTYRVVSVLTVLHQDWLNGKEYKCKVSNKALPAPIEKTISKAKGQPREPQVYTLPPCRDELTKNQVSLWCLVKGFYPSDIAVEWESNGQPENNYKTTPPVLDSDGSFFLYSKLTVDKSRWQQGNVFSCSVMHEALHNHYTQKSLSLSPG

SEQ ID NO: 315 - DNA, 1437 bp, synthetic construct
  source 1..1437: mol_type = other DNA; note = hrCD20scFvFcknob
gagatccagctgacacagagcccttctagcctgtctgccagcgtgggcgacagagtgaccatcacatgtagagccagcagcagcgtgtcctatatccactggttccagcagaagcctggaagcgcccctaagtccctgatctatgccacaagcaacctggcctctggcgtgcccagcagattttctggcagcggctctggcaccgactacaccctgacaatcagctccctgcagcctgaggacttcgccacctactactgccagcagtggacaagcaaccctcctacatttggcggaggcaccaagctggaaatcaagggcggcggaggaagcggcggatctggatctggtggcggaggatctgcttctggctctggacaggttcagctggttcagcctggcgccgaagtgaaaaaacctggcgcctccgtgaagatgagctgcaaggccagcggctacaccttcaccagctacaacatgcactgggtccgacaggcccctggcagaggacttgaatggatgggcgccatctatcccggcagcggcgatacaagctacagccagaaattccagggcaaagtgaccctgaccgccgacaagagcacaagcaccgcctacatggaactgagcagcctggaaagcgaggacaccgccgtgtactactgtgccagaagcacctactacggcggcgactggtacttcaatgtgtggggagccggcaccaccgtgacagtttctgctgcttctggcggctccggagataagacccacacatgtcctccatgtcctgctccagaactgctcggcggcccttctgtgttcctgtttcctccaaagcctaaggacaccctgatgatcagcagaacccctgaagtgacctgcgtggtggtggatgtgtctcacgaggaccccgaagtgaagttcaattggtacgtggacggcgtggaagtgcacaacgccaagaccaagcctagagaggaacagtacaacagcacctacagagtggtgtccgtgctgaccgtgctgcaccaggattggctgaacggcaaagagtacaagtgcaaggtgtccaacaaggccctgcctgctcctatcgagaaaaccatcagcaaggccaagggccagcctagggaaccccaggtttacacccttcctccatgccgggatgagctgaccaagaaccaggtgtccctgtggtgtctcgtgaagggcttctaccccagcgacattgccgtggaatgggagagcaatggccagcctgagaacaactacaagacaacccctcctgtgctggacagcgacggctcattcttcctgtacagcaagctgacagtcgacaagtccagatggcagcagggcaacgtgttcagttgcagcgtgatgcacgaggccctgcacaaccactacacccagaagtccctgagcctgtctcctgga

SEQ ID NO: 316 - protein, 716 aa, synthetic construct
  source 1..716: note = hrCD20CD20Fcknob
EIQLTQSPSSLSASVGDRVTITCRASSSVSYIHWFQQKPGSAPKSLIYATSNLASGVPSRFSGSGSGTDYTLTISSLQPEDFATYYCQQWTSNPPTFGGGTKLEIKGGSSGEIQLTQSPSSLSASVGDRVTITCRASSSVSYIHWFQQKPGSAPKSLIYATSNLASGVPSRFSGSGSGTDYTLTISSLQPEDFATYYCQQWTSNPPTFGGGTKLEIKGGGGSGGSGSGGGGSASGSGQVQLVQPGAEVKKPGASVKMSCKASGYTFTSYNMHWVRQAPGRGLEWMGAIYPGSGDTSYSQKFQGKVTLTADKSTSTAYMELSSLESEDTAVYYCARSTYYGGDWYFNVWGAGTTVTVSAGGSSGQVQLVQPGAEVKKPGASVKMSCKASGYTFTSYNMHWVRQAPGRGLEWMGAIYPGSGDTSYSQKFQGKVTLTADKSTSTAYMELSSLESEDTAVYYCARSTYYGGDWYFNVWGAGTTVTVSAASGGSGDKTHTCPPCPAPELLGGPSVFLFPPKPKDTLMISRTPEVTCVVVDVSHEDPEVKFNWYVDGVEVHNAKTKPREEQYNSTYRVVSVLTVLHQDWLNGKEYKCKVSNKALPAPIEKTISKAKGQPREPQVYTLPPCRDELTKNQVSLWCLVKGFYPSDIAVEWESNGQPENNYKTTPPVLDSDGSFFLYSKLTVDKSRWQQGNVFSCSVMHEALHNHYTQKSLSLSPG

SEQ ID NO: 317 - DNA, 2148 bp, synthetic construct
  source 1..2148: mol_type = other DNA; note = hrCD20CD20Fcknob
gagatccagctgacacagagcccttctagcctgtctgccagcgtgggcgacagagtgaccatcacatgtagagccagcagcagcgtgtcctatatccactggttccagcagaagcctggaagcgcccctaagtccctgatctatgccacaagcaacctggcctctggcgtgcccagcagattttctggcagcggctctggcaccgactacaccctgacaatcagctccctgcagcctgaggacttcgccacctactactgccagcagtggacaagcaaccctcctacatttggcggaggcaccaagctggaaatcaagggcggaagcagcggcgagatccagctgacacagagcccttctagcctgtctgccagcgtgggcgacagagtgaccatcacatgtagagccagcagcagcgtgtcctatatccactggttccagcagaagcctggaagcgcccctaagtccctgatctatgccacaagcaacctggcctctggcgtgcccagcagattttctggcagcggctctggcaccgactacaccctgacaatcagctccctgcagcctgaggacttcgccacctactactgccagcagtggacaagcaaccctcctacatttggcggaggcaccaagctggaaatcaagggcggcggaggaagcggcggatctggatctggtggcggaggatctgcttctggctctggacaggttcagctggttcagcctggcgccgaagtgaaaaaacctggcgcctccgtgaagatgagctgcaaggccagcggctacaccttcaccagctacaacatgcactgggtccgacaggcccctggcagaggacttgaatggatgggcgccatctatcccggcagcggcgatacaagctacagccagaaattccagggcaaagtgaccctgaccgccgacaagagcacaagcaccgcctacatggaactgagcagcctggaaagcgaggacaccgccgtgtactactgtgccagaagcacctactacggcggcgactggtacttcaatgtgtggggagccggcaccaccgtgacagtttctgctggcggaagcagcggccaggttcagctggttcagcctggcgccgaagtgaaaaaacctggcgcctccgtgaagatgagctgcaaggccagcggctacaccttcaccagctacaacatgcactgggtccgacaggcccctggcagaggacttgaatggatgggcgccatctatcccggcagcggcgatacaagctacagccagaaattccagggcaaagtgaccctgaccgccgacaagagcacaagcaccgcctacatggaactgagcagcctggaaagcgaggacaccgccgtgtactactgtgccagaagcacctactacggcggcgactggtacttcaatgtgtggggagccggcaccaccgtgacagtttctgctgcttctggcggctccggagataagacccacacatgtcctccatgtcctgctccagaactgctcggcggcccttctgtgttcctgtttcctccaaagcctaaggacaccctgatgatcagcagaacccctgaagtgacctgcgtggtggtggatgtgtctcacgaggaccccgaagtgaagttcaattggtacgtggacggcgtggaagtgcacaacgccaagaccaagcctagagaggaacagtacaacagcacctacagagtggtgtccgtgctgaccgtgctgcaccaggattggctgaacggcaaagagtacaagtgcaaggtgtccaacaaggccctgcctgctcctatcgagaaaaccatcagcaaggccaagggccagcctagggaaccccaggtttacacccttcctccatgccgggatgagctgaccaagaaccaggtgtccctgtggtgtctcgtgaagggcttctaccccagcgacattgccgtggaatgggagagcaatggccagcctgagaacaactacaagacaacccctcctgtgctggacagcgacggctcattcttcctgtacagcaagctgacagtcgacaagtccagatggcagcagggcaacgtgttcagttgcagcgtgatgcacgaggccctgcacaaccactacacccagaagtccctgagcctgtctcctgga

SEQ ID NO: 318 - protein, 724 aa, synthetic construct
  source 1..724: note = hrCD20hCD19Fcknob
EIQLTQSPSSLSASVGDRVTITCRASSSVSYIHWFQQKPGSAPKSLIYATSNLASGVPSRFSGSGSGTDYTLTISSLQPEDFATYYCQQWTSNPPTFGGGTKLEIKGGSSGDIQLTQSPSFLSASVGDRVTITCKASQSVDYSGDSYLNWYQQKPGKAPKLLIYDASNLVSGVPSRFSGSGSGTEFTLTISSLQPEDFATYYCQQSTENPWTFGGGTKLEIKGGGGSGGSGSGGGGSASGSGQVQLVQSGAEVKKPGSSVKVSCKASGYAFSSYWMNWVRQAPGQGLEWMGQIWPGDSDTNYAQKFQGRVTITADESTSTAYMELSSLRSEDTAVYYCARRETTTVGRYYYAMDYWGQGTTVTVSSGGSSGQVQLVQPGAEVKKPGASVKMSCKASGYTFTSYNMHWVRQAPGRGLEWMGAIYPGSGDTSYSQKFQGKVTLTADKSTSTAYMELSSLESEDTAVYYCARSTYYGGDWYFNVWGAGTTVTVSAASGGSGDKTHTCPPCPAPELLGGPSVFLFPPKPKDTLMISRTPEVTCVVVDVSHEDPEVKFNWYVDGVEVHNAKTKPREEQYNSTYRVVSVLTVLHQDWLNGKEYKCKVSNKALPAPIEKTISKAKGQPREPQVYTLPPCRDELTKNQVSLWCLVKGFYPSDIAVEWESNGQPENNYKTTPPVLDSDGSFFLYSKLTVDKSRWQQGNVFSCSVMHEALHNHYTQKSLSLSPG

SEQ ID NO: 319 - DNA, 2172 bp, synthetic construct
  source 1..2172: mol_type = other DNA; note = hrCD20hCD19Fcknob
gagatccagctgacacagagcccttctagcctgtctgccagcgtgggcgacagagtgaccatcacatgtagagccagcagcagcgtgtcctatatccactggttccagcagaagcctggaagcgcccctaagtccctgatctatgccacaagcaacctggcctctggcgtgcccagcagattttctggcagcggctctggcaccgactacaccctgacaatcagctccctgcagcctgaggacttcgccacctactactgccagcagtggacaagcaaccctcctacatttggcggaggcaccaagctggaaatcaagggcggatcttctggagacatccagctgacccagtctccaagctttctgagcgccagcgtgggcgacagagtgaccatcacatgtaaagccagccagagcgtggactacagcggcgacagctacctgaactggtatcagcagaagcccggcaaggcccctaagctgctgatctacgacgcctccaatctggtgtccggcgtgcccagcagattttctggctctggaagcggcaccgagttcaccctgaccatatctagcctgcagcctgaggacttcgccacctactactgccagcagagcacagagaacccctggacatttggcggcggaacaaagctggaaatcaagggaggcggaggatctggcggatctggaagtggcggcggtggatctgcttctggctctggccaggttcagctggttcagtctggcgccgaagtgaagaaacctggcagcagcgtgaaggtgtcctgcaaggcctctggctacgccttcagcagctactggatgaactgggtccgacaggcccctggacaaggcttggaatggatgggccaaatctggcctggcgacagcgacaccaattacgcccagaaattccagggcagagtgaccatcaccgccgacgagtctacaagcaccgcctacatggaactgagcagcctgagaagcgaggacaccgccgtgtactactgtgccagacgggaaaccaccaccgtgggcagatattactacgccatggactactggggccagggcaccacagtgacagtctcttctggaggcagctctggccaggttcagctggttcagcctggcgccgaagtgaaaaaacctggcgcctccgtgaagatgagctgcaaggccagcggctacaccttcaccagctacaacatgcactgggtccgacaggcccctggcagaggacttgaatggatgggcgccatctatcccggcagcggcgatacaagctacagccagaaattccagggcaaagtgaccctgaccgccgacaagagcacaagcaccgcctacatggaactgagcagcctggaaagcgaggacaccgccgtgtactactgtgccagaagcacctactacggcggcgactggtacttcaatgtgtggggagccggcaccaccgtgacagtttctgctgcttctggcggctccggagataagacccacacatgtcctccatgtcctgctccagaactgctcggcggcccttctgtgttcctgtttcctccaaagcctaaggacaccctgatgatcagcagaacccctgaagtgacctgcgtggtggtggatgtgtctcacgaggaccccgaagtgaagttcaattggtacgtggacggcgtggaagtgcacaacgccaagaccaagcctagagaggaacagtacaacagcacctacagagtggtgtccgtgctgaccgtgctgcaccaggattggctgaacggcaaagagtacaagtgcaaggtgtccaacaaggccctgcctgctcctatcgagaaaaccatcagcaaggccaagggccagcctagggaaccccaggtttacacccttcctccatgccgggatgagctgaccaagaaccaggtgtccctgtggtgtctcgtgaagggcttctaccccagcgacattgccgtggaatgggagagcaatggccagcctgagaacaactacaagacaacccctcctgtgctggacagcgacggctcattcttcctgtacagcaagctgacagtcgacaagtccagatggcagcagggcaacgtgttcagttgcagcgtgatgcacgaggccctgcacaaccactacacccagaagtccctgagcctgtctcctgga

SEQ ID NO: 320 - protein, 724 aa, synthetic construct
  source 1..724: note = hCD19hrCD20Fcknob
DIQLTQSPSFLSASVGDRVTITCKASQSVDYSGDSYLNWYQQKPGKAPKLLIYDASNLVSGVPSRFSGSGSGTEFTLTISSLQPEDFATYYCQQSTENPWTFGGGTKLEIKGGSSGEIQLTQSPSSLSASVGDRVTITCRASSSVSYIHWFQQKPGSAPKSLIYATSNLASGVPSRFSGSGSGTDYTLTISSLQPEDFATYYCQQWTSNPPTFGGGTKLEIKGGGGSGGSGSGGGGSASGSGQVQLVQPGAEVKKPGASVKMSCKASGYTFTSYNMHWVRQAPGRGLEWMGAIYPGSGDTSYSQKFQGKVTLTADKSTSTAYMELSSLESEDTAVYYCARSTYYGGDWYFNVWGAGTTVTVSAGGSSGQVQLVQSGAEVKKPGSSVKVSCKASGYAFSSYWMNWVRQAPGQGLEWMGQIWPGDSDTNYAQKFQGRVTITADESTSTAYMELSSLRSEDTAVYYCARRETTTVGRYYYAMDYWGQGTTVTVSSASGGSGDKTHTCPPCPAPELLGGPSVFLFPPKPKDTLMISRTPEVTCVVVDVSHEDPEVKFNWYVDGVEVHNAKTKPREEQYNSTYRVVSVLTVLHQDWLNGKEYKCKVSNKALPAPIEKTISKAKGQPREPQVYTLPPCRDELTKNQVSLWCLVKGFYPSDIAVEWESNGQPENNYKTTPPVLDSDGSFFLYSKLTVDKSRWQQGNVFSCSVMHEALHNHYTQKSLSLSPG

SEQ ID NO: 321 - DNA, 2172 bp, synthetic construct
  source 1..2172: mol_type = other DNA; note = hCD19hrCD20Fcknob
gacatccagctgacccagtctccaagctttctgagcgccagcgtgggcgacagagtgaccatcacatgtaaagccagccagagcgtggactacagcggcgacagctacctgaactggtatcagcagaagcccggcaaggcccctaagctgctgatctacgacgcctccaatctggtgtccggcgtgcccagcagattttctggctctggaagcggcaccgagttcaccctgaccatatctagcctgcagcctgaggacttcgccacctactactgccagcagagcacagagaacccctggacatttggcggcggaacaaagctggaaatcaagggcggatcttctggagagatccagctgacacagagcccttctagcctgtctgccagcgtgggcgacagagtgaccatcacatgtagagccagcagcagcgtgtcctatatccactggttccagcagaagcctggaagcgcccctaagtccctgatctatgccacaagcaacctggcctctggcgtgcccagcagattttctggcagcggctctggcaccgactacaccctgacaatcagctccctgcagcctgaggacttcgccacctactactgccagcagtggacaagcaaccctcctacatttggcggaggcaccaagctggaaatcaagggaggcggaggatctggcggatctggaagtggcggcggtggatctgcttctggctctggccaggttcagctggttcagcctggcgccgaagtgaaaaaacctggcgcctccgtgaagatgagctgcaaggccagcggctacaccttcaccagctacaacatgcactgggtccgacaggcccctggcagaggacttgaatggatgggcgccatctatcccggcagcggcgatacaagctacagccagaaattccagggcaaagtgaccctgaccgccgacaagagcacaagcaccgcctacatggaactgagcagcctggaaagcgaggacaccgccgtgtactactgtgccagaagcacctactacggcggcgactggtacttcaatgtgtggggagccggcaccaccgtgacagtttctgctggaggcagctctggccaggttcagctggttcagtctggcgccgaagtgaagaaacctggcagcagcgtgaaggtgtcctgcaaggcctctggctacgccttcagcagctactggatgaactgggtccgacaggcccctggacaaggcttggaatggatgggccaaatctggcctggcgacagcgacaccaattacgcccagaaattccagggcagagtgaccatcaccgccgacgagtctacaagcaccgcctacatggaactgagcagcctgagaagcgaggacaccgccgtgtactactgtgccagacgggaaaccaccaccgtgggcagatattactacgccatggactactggggccagggcaccacagtgacagtctcttctgcttctggcggctccggagataagacccacacatgtcctccatgtcctgctccagaactgctcggcggcccttctgtgttcctgtttcctccaaagcctaaggacaccctgatgatcagcagaacccctgaagtgacctgcgtggtggtggatgtgtctcacgaggaccccgaagtgaagttcaattggtacgtggacggcgtggaagtgcacaacgccaagaccaagcctagagaggaacagtacaacagcacctacagagtggtgtccgtgctgaccgtgctgcaccaggattggctgaacggcaaagagtacaagtgcaaggtgtccaacaaggccctgcctgctcctatcgagaaaaccatcagcaaggccaagggccagcctagggaaccccaggtttacacccttcctccatgccgggatgagctgaccaagaaccaggtgtccctgtggtgtctcgtgaagggcttctaccccagcgacattgccgtggaatgggagagcaatggccagcctgagaacaactacaagacaacccctcctgtgctggacagcgacggctcattcttcctgtacagcaagctgacagtcgacaagtccagatggcagcagggcaacgtgttcagttgcagcgtgatgcacgaggccctgcacaaccactacacccagaagtccctgagcctgtctcctgga

SEQ ID NO: 322 - protein, 327 aa, synthetic construct
  source 1..327: note = hrCD20_hep12hOKT3L
EIQLTQSPSSLSASVGDRVTITCRASSSVSYIHWFQQKPGSAPKSLIYATSNLASGVPSRFSGSGSGTDYTLTISSLQPEDFATYYCQQWTSNPPTFGGGTKLEIKASTRKAGGDIQLTQSPSSLSASVGDRVTITCRASQSISYLNWYQQKPGKSPKRWIYDTSKLASGVPSRFSGSGSGTDYTLTISSMQPEDAATYYCQQWSSNPLTFGGGTKVEIKRTVAAPSVFIFPPSDEQLKSGTASVVCLLNNFYPREAKVQWKVDNALQSGNSQESVTEQDSKDSTYSLSSTLTLSKADYEKHKVYACEVTHQGLSSPVTKSFNRGEC

SEQ ID NO: 323 - DNA, 981 bp, synthetic construct; identical to SEQ ID NO: 303
  source 1..981: mol_type = other DNA; note = hrCD20_hep12hOKT3L

SEQ ID NO: 324 - protein, 324 aa, synthetic construct
  source 1..324: note = hrCD20_ssGShOKT3L
EIQLTQSPSSLSASVGDRVTITCRASSSVSYIHWFQQKPGSAPKSLIYATSNLASGVPSRFSGSGSGTDYTLTISSLQPEDFATYYCQQWTSNPPTFGCGTKLEIKGGSGSDIQLTQSPSSLSASVGDRVTITCRASQSISYLNWYQQKPGKSPKRWIYDTSKLASGVPSRFSGSGSGTDYTLTISSMQPEDAATYYCQQWSSNPLTFGGGTKVEIKRTVAAPSVFIFPPSDEQLKSGTASVVCLLNNFYPREAKVQWKVDNALQSGNSQESVTEQDSKDSTYSLSSTLTLSKADYEKHKVYACEVTHQGLSSPVTKSFNRGEC

SEQ ID NO: 325 - DNA, 972 bp, synthetic construct
  source 1..972: mol_type = other DNA; note = hrCD20_ssGShOKT3L
gagatccagctgacacagagcccttctagcctgtctgccagcgtgggcgacagagtgaccatcacatgtagagccagcagcagcgtgtcctatatccactggttccagcagaagcctggaagcgcccctaagtccctgatctatgccacaagcaacctggcctctggcgtgcccagcagattttctggcagcggctctggcaccgactacaccctgacaatcagctccctgcagcctgaggacttcgccacctactactgccagcagtggacaagcaaccctcctacatttggctgcggcaccaagctggaaatcaagggcggctccggaagcgacatccagctgacacagagcccttctagcctgtctgccagcgtgggcgacagagtgaccatcacatgtagagccagccagagcatcagctacctgaactggtatcagcagaagcccggcaagagccccaagcggtggatctacgatacaagcaagctggcctctggcgtgcccagcagattttctggctctggcagcggcaccgactacaccctgacaatcagcagcatgcagcctgaggatgccgccacctactactgccagcagtggtccagcaatcccctgacatttggcggaggcaccaaggtggaaatcaagcgtacggtggccgctcccagcgtgttcatcttcccacctagcgacgagcagctgaagtccggcacagcctctgtcgtgtgcctgctgaacaacttctacccccgcgaggccaaagtgcagtggaaggtggacaacgccctgcagagcggcaacagccaggaaagcgtgaccgagcaggacagcaaggactccacctacagcctgagcagcaccctgacactgagcaaggccgactacgagaagcacaaggtgtacgcctgcgaagtgacccaccagggcctgtctagccccgtgaccaagagcttcaaccggggcgagtgt

SEQ ID NO: 326 - protein, 577 aa, synthetic construct
  source 1..577: note = hrCD20_cl5hOKT3Hhole
QVQLVQPGAEVKKPGASVKMSCKASGYTFTSYNMHWVRQAPGRGLEWMGAIYPGNGDTSYNQKFQGRVTLTADKSTSTAYMELSSLESEDTAVYYCARSTYYGGDWYFNVWGAGTTVTVSAASTRKAGGQVQLVQSGAEVAKPGASVKVSCKASGYTFTRYTMHWVKQAPGQGLEWIGYINPSRGYTNYAQKFQGKATLTTDKSTSTAYMELSSLRSEDTAVYYCARYYDDHYSLDYWGQGTTLTVSSASTKGPSVFPLAPSSKSTSGGTAALGCLVKDYFPEPVTVSWNSGALTSGVHTFPAVLQSSGLYSLSSVVTVPSSSLGTQTYICNVNHKPSNTKVDKKVEPKSCDKTHTCPPCPAPELLGGPSVFLFPPKPKDTLMISRTPEVTCVVVDVSHEDPEVKFNWYVDGVEVHNAKTKPREEQYNSTYRVVSVLTVLHQDWLNGKEYKCKVSNKALPAPIEKTISKAKGQPREPQVCTLPPSRDELTKNQVSLSCAVKGFYPSDIAVEWESNGQPENNYKTTPPVLDSDGSFFLVSKLTVDKSRWQQGNVFSCSVMHEALHNHYTQKSLSLSPG

SEQ ID NO: 327 - DNA, 1725 bp, synthetic construct; identical to SEQ ID NO: 227
  source 1..1725: mol_type = other DNA; note = hrCD20_cl5hOKT3Hhole

SEQ ID NO: 328 - protein, 577 aa, synthetic construct
  source 1..577: note = hrCD20_cl5hOKT3HholeLALAPA
QVQLVQPGAEVKKPGASVKMSCKASGYTFTSYNMHWVRQAPGRGLEWMGAIYPGNGDTSYNQKFQGRVTLTADKSTSTAYMELSSLESEDTAVYYCARSTYYGGDWYFNVWGAGTTVTVSAASTRKAGGQVQLVQSGAEVAKPGASVKVSCKASGYTFTRYTMHWVKQAPGQGLEWIGYINPSRGYTNYAQKFQGKATLTTDKSTSTAYMELSSLRSEDTAVYYCARYYDDHYSLDYWGQGTTLTVSSASTKGPSVFPLAPSSKSTSGGTAALGCLVKDYFPEPVTVSWNSGALTSGVHTFPAVLQSSGLYSLSSVVTVPSSSLGTQTYICNVNHKPSNTKVDKKVEPKSCDKTHTCPPCPAPEAAGGPSVFLFPPKPKDTLMISRTPEVTCVVVDVSHEDPEVKFNWYVDGVEVHNAKTKPREEQYNSTYRVVSVLTVLHQDWLNGKEYKCKVSNKALAAPIEKTISKAKGQPREPQVCTLPPSRDELTKNQVSLSCAVKGFYPSDIAVEWESNGQPENNYKTTPPVLDSDGSFFLVSKLTVDKSRWQQGNVFSCSVMHEALHNHYTQKSLSLSPG

SEQ ID NO: 329 - DNA, 1731 bp, synthetic construct
  source 1..1731: mol_type = other DNA; note = hrCD20_cl5hOKT3HholeLALAPA
caggttcagctggttcagcctggcgccgaagtgaaaaaacctggcgcctccgtgaagatgagctgcaaggccagcggctacaccttcaccagctacaacatgcactgggtccgacaggcccctggcagaggacttgaatggatgggcgccatctatcccggcaacggcgatacaagctacaaccagaaattccagggcagagtgaccctgaccgccgacaagagcacaagcaccgcctacatggaactgagcagcctggaaagcgaggacaccgccgtgtactactgtgccagaagcacctactacggcggcgactggtacttcaatgtgtggggagccggcaccaccgtgacagtttctgctgctagcacacggaaggctggcggacaggttcagctggttcagtctggcgccgaagtggctaaacctggcgcctccgtgaaggtgtcctgtaaagccagcggctacacattcacccggtacaccatgcactgggtcaagcaggctccaggacaaggcttggagtggatcggctacatcaaccctagccggggctacaccaattacgcccagaagttccagggcaaggccacactgaccaccgacaagagcacaagcaccgcctacatggaactgagcagcctgagaagcgaggacaccgccgtgtactactgtgcccggtactacgacgaccactacagcctggattattggggccagggcacaaccctgaccgtgtcatctgcttcgaccaagggcccatccgtgtttcctctggctcccagcagcaagtctacaagcggaggaacagccgctctgggctgcctggtcaaggattactttcccgagcctgtgaccgtgtcctggaattctggcgctctgacaagcggcgtgcacacctttccagctgtgctgcaaagcagcggcctgtactctctgagcagcgtggtcacagtgcctagctctagcctgggcacccagacctacatctgcaatgtgaaccacaagcctagcaacaccaaggtggacaagaaggtggaacccaagagctgcgataagacccacacatgtcctccatgtcctgctccagaagctgctggcggcccttctgtgttcctgtttcctccaaagcctaaggacaccctgatgatcagcagaacccctgaagtgacctgcgtggtggtggatgtgtctcacgaggaccccgaagtgaagttcaattggtacgtggacggcgtggaagtgcacaacgccaagaccaagcctagagaggaacagtacaacagcacctacagagtggtgtccgtgctgaccgtgctgcaccaggattggctgaacggcaaagagtacaagtgcaaggtgtccaacaaggccctggccgctcctatcgagaaaaccatcagcaaggccaagggccagcctagggaaccccaggtttgtacccttcctccaagccgggatgagctgaccaagaaccaggtgtccctgagctgtgccgtgaagggcttctaccccagcgacattgccgtggaatgggagagcaatggccagcctgagaacaactacaagacaacccctcctgtgctggacagcgacggctcattcttcctggtgagcaagctgacagtcgacaagtccagatggcagcagggcaacgtgttcagttgcagcgtgatgcacgaggccctgcacaaccactacacccagaagtccctgagcctgtctcctgga

SEQ ID NO: 330 - protein, 577 aa, synthetic construct
  source 1..577: note = hrCD20_sscl5hOKT3Hhole
QVQLVQPGAEVKKPGASVKMSCKASGYTFTSYNMHWVRQAPGRCLEWMGAIYPGNGDTSYNQKFQGRVTLTADKSTSTAYMELSSLESEDTAVYYCARSTYYGGDWYFNVWGAGTTVTVSAASTRKAGGQVQLVQSGAEVAKPGASVKVSCKASGYTFTRYTMHWVKQAPGQGLEWIGYINPSRGYTNYAQKFQGKATLTTDKSTSTAYMELSSLRSEDTAVYYCARYYDDHYSLDYWGQGTTLTVSSASTKGPSVFPLAPSSKSTSGGTAALGCLVKDYFPEPVTVSWNSGALTSGVHTFPAVLQSSGLYSLSSVVTVPSSSLGTQTYICNVNHKPSNTKVDKKVEPKSCDKTHTCPPCPAPELLGGPSVFLFPPKPKDTLMISRTPEVTCVVVDVSHEDPEVKFNWYVDGVEVHNAKTKPREEQYNSTYRVVSVLTVLHQDWLNGKEYKCKVSNKALPAPIEKTISKAKGQPREPQVCTLPPSRDELTKNQVSLSCAVKGFYPSDIAVEWESNGQPENNYKTTPPVLDSDGSFFLVSKLTVDKSRWQQGNVFSCSVMHEALHNHYTQKSLSLSPG

SEQ ID NO: 331 - DNA, 1731 bp, synthetic construct
  source 1..1731: mol_type = other DNA; note = hrCD20_sscl5hOKT3Hhole
caggttcagctggttcagcctggcgccgaagtgaaaaaacctggcgcctccgtgaagatgagctgcaaggccagcggctacaccttcaccagctacaacatgcactgggtccgacaggcccctggcagatgccttgaatggatgggcgccatctatcccggcaacggcgatacaagctacaaccagaaattccagggcagagtgaccctgaccgccgacaagagcacaagcaccgcctacatggaactgagcagcctggaaagcgaggacaccgccgtgtactactgtgccagaagcacctactacggcggcgactggtacttcaatgtgtggggagccggcaccaccgtgacagtttctgctgctagcacacggaaggctggcggacaggttcagctggttcagtctggcgccgaagtggctaaacctggcgcctccgtgaaggtgtcctgtaaagccagcggctacacattcacccggtacaccatgcactgggtcaagcaggctccaggacaaggcttggagtggatcggctacatcaaccctagccggggctacaccaattacgcccagaagttccagggcaaggccacactgaccaccgacaagagcacaagcaccgcctacatggaactgagcagcctgagaagcgaggacaccgccgtgtactactgtgcccggtactacgacgaccactacagcctggattattggggccagggcacaaccctgaccgtgtcatctgcttcgaccaagggcccatccgtgtttcctctggctcccagcagcaagtctacaagcggaggaacagccgctctgggctgcctggtcaaggattactttcccgagcctgtgaccgtgtcctggaattctggcgctctgacaagcggcgtgcacacctttccagctgtgctgcaaagcagcggcctgtactctctgagcagcgtggtcacagtgcctagctctagcctgggcacccagacctacatctgcaatgtgaaccacaagcctagcaacaccaaggtggacaagaaggtggaacccaagagctgcgataagacccacacatgtcctccatgtcctgctccagaactgctcggcggcccttctgtgttcctgtttcctccaaagcctaaggacaccctgatgatcagcagaacccctgaagtgacctgcgtggtggtggatgtgtctcacgaggaccccgaagtgaagttcaattggtacgtggacggcgtggaagtgcacaacgccaagaccaagcctagagaggaacagtacaacagcacctacagagtggtgtccgtgctgaccgtgctgcaccaggattggctgaacggcaaagagtacaagtgcaaggtgtccaacaaggccctgcctgctcctatcgagaaaaccatcagcaaggccaagggccagcctagggaaccccaggtttgtacccttcctccaagccgggatgagctgaccaagaaccaggtgtccctgagctgtgccgtgaagggcttctaccccagcgacattgccgtggaatgggagagcaatggccagcctgagaacaactacaagacaacccctcctgtgctggacagcgacggctcattcttcctggtgagcaagctgacagtcgacaagtccagatggcagcagggcaacgtgttcagttgcagcgtgatgcacgaggccctgcacaaccactacacccagaagtccctgagcctgtctcctgga

SEQ ID NO: 332 - protein, 577 aa, synthetic construct
  source 1..577: note = hrCD20_sscl5hOKT3HholeLALAPA
QVQLVQPGAEVKKPGASVKMSCKASGYTFTSYNMHWVRQAPGRCLEWMGAIYPGNGDTSYNQKFQGRVTLTADKSTSTAYMELSSLESEDTAVYYCARSTYYGGDWYFNVWGAGTTVTVSAASTRKAGGQVQLVQSGAEVAKPGASVKVSCKASGYTFTRYTMHWVKQAPGQGLEWIGYINPSRGYTNYAQKFQGKATLTTDKSTSTAYMELSSLRSEDTAVYYCARYYDDHYSLDYWGQGTTLTVSSASTKGPSVFPLAPSSKSTSGGTAALGCLVKDYFPEPVTVSWNSGALTSGVHTFPAVLQSSGLYSLSSVVTVPSSSLGTQTYICNVNHKPSNTKVDKKVEPKSCDKTHTCPPCPAPEAAGGPSVFLFPPKPKDTLMISRTPEVTCVVVDVSHEDPEVKFNWYVDGVEVHNAKTKPREEQYNSTYRVVSVLTVLHQDWLNGKEYKCKVSNKALAAPIEKTISKAKGQPREPQVCTLPPSRDELTKNQVSLSCAVKGFYPSDIAVEWESNGQPENNYKTTPPVLDSDGSFFLVSKLTVDKSRWQQGNVFSCSVMHEALHNHYTQKSLSLSPG

SEQ ID NO: 333 - DNA, 1731 bp, synthetic construct
  source 1..1731: mol_type = other DNA; note = hrCD20_sscl5hOKT3HholeLALAPA
caggttcagctggttcagcctggcgccgaagtgaaaaaacctggcgcctccgtgaagatgagctgcaaggccagcggctacaccttcaccagctacaacatgcactgggtccgacaggcccctggcagatgccttgaatggatgggcgccatctatcccggcaacggcgatacaagctacaaccagaaattccagggcagagtgaccctgaccgccgacaagagcacaagcaccgcctacatggaactgagcagcctggaaagcgaggacaccgccgtgtactactgtgccagaagcacctactacggcggcgactggtacttcaatgtgtggggagccggcaccaccgtgacagtttctgctgctagcacacggaaggctggcggacaggttcagctggttcagtctggcgccgaagtggctaaacctggcgcctccgtgaaggtgtcctgtaaagccagcggctacacattcacccggtacaccatgcactgggtcaagcaggctccaggacaaggcttggagtggatcggctacatcaaccctagccggggctacaccaattacgcccagaagttccagggcaaggccacactgaccaccgacaagagcacaagcaccgcctacatggaactgagcagcctgagaagcgaggacaccgccgtgtactactgtgcccggtactacgacgaccactacagcctggattattggggccagggcacaaccctgaccgtgtcatctgcttcgaccaagggcccatccgtgtttcctctggctcccagcagcaagtctacaagcggaggaacagccgctctgggctgcctggtcaaggattactttcccgagcctgtgaccgtgtcctggaattctggcgctctgacaagcggcgtgcacacctttccagctgtgctgcaaagcagcggcctgtactctctgagcagcgtggtcacagtgcctagctctagcctgggcacccagacctacatctgcaatgtgaaccacaagcctagcaacaccaaggtggacaagaaggtggaacccaagagctgcgataagacccacacatgtcctccatgtcctgctccagaagctgctggcggcccttctgtgttcctgtttcctccaaagcctaaggacaccctgatgatcagcagaacccctgaagtgacctgcgtggtggtggatgtgtctcacgaggaccccgaagtgaagttcaattggtacgtggacggcgtggaagtgcacaacgccaagaccaagcctagagaggaacagtacaacagcacctacagagtggtgtccgtgctgaccgtgctgcaccaggattggctgaacggcaaagagtacaagtgcaaggtgtccaacaaggccctggccgctcctatcgagaaaaccatcagcaaggccaagggccagcctagggaaccccaggtttgtacccttcctccaagccgggatgagctgaccaagaaccaggtgtccctgagctgtgccgtgaagggcttctaccccagcgacattgccgtggaatgggagagcaatggccagcctgagaacaactacaagacaacccctcctgtgctggacagcgacggctcattcttcctggtgagcaagctgacagtcgacaagtccagatggcagcagggcaacgtgttcagttgcagcgtgatgcacgaggccctgcacaaccactacacccagaagtccctgagcctgtctcctgga

SEQ ID NO: 334 - protein, 574 aa, synthetic construct
  source 1..574: note = hrCD20_GShOKT3Hhole
QVQLVQPGAEVKKPGASVKMSCKASGYTFTSYNMHWVRQAPGRGLEWMGAIYPGNGDTSYNQKFQGRVTLTADKSTSTAYMELSSLESEDTAVYYCARSTYYGGDWYFNVWGAGTTVTVSAGGSGSQVQLVQSGAEVAKPGASVKVSCKASGYTFTRYTMHWVKQAPGQGLEWIGYINPSRGYTNYAQKFQGKATLTTDKSTSTAYMELSSLRSEDTAVYYCARYYDDHYSLDYWGQGTTLTVSSASTKGPSVFPLAPSSKSTSGGTAALGCLVKDYFPEPVTVSWNSGALTSGVHTFPAVLQSSGLYSLSSVVTVPSSSLGTQTYICNVNHKPSNTKVDKKVEPKSCDKTHTCPPCPAPELLGGPSVFLFPPKPKDTLMISRTPEVTCVVVDVSHEDPEVKFNWYVDGVEVHNAKTKPREEQYNSTYRVVSVLTVLHQDWLNGKEYKCKVSNKALPAPIEKTISKAKGQPREPQVCTLPPSRDELTKNQVSLSCAVKGFYPSDIAVEWESNGQPENNYKTTPPVLDSDGSFFLVSKLTVDKSRWQQGNVFSCSVMHEALHNHYTQKSLSLSPG

SEQ ID NO: 335 - DNA, 1722 bp, synthetic construct
  source 1..1722: mol_type = other DNA; note = hrCD20_GShOKT3Hhole
caggttcagctggttcagcctggcgccgaagtgaaaaaacctggcgcctccgtgaagatgagctgcaaggccagcggctacaccttcaccagctacaacatgcactgggtccgacaggcccctggcagaggacttgaatggatgggcgccatctatcccggcaacggcgatacaagctacaaccagaaattccagggcagagtgaccctgaccgccgacaagagcacaagcaccgcctacatggaactgagcagcctggaaagcgaggacaccgccgtgtactactgtgccagaagcacctactacggcggcgactggtacttcaatgtgtggggagccggcaccaccgtgacagtttctgctggcggctccggaagccaggttcagctggttcagtctggcgccgaagtggctaaacctggcgcctccgtgaaggtgtcctgtaaagccagcggctacacattcacccggtacaccatgcactgggtcaagcaggctccaggacaaggcttggagtggatcggctacatcaaccctagccggggctacaccaattacgcccagaagttccagggcaaggccacactgaccaccgacaagagcacaagcaccgcctacatggaactgagcagcctgagaagcgaggacaccgccgtgtactactgtgcccggtactacgacgaccactacagcctggattattggggccagggcacaaccctgaccgtgtcatctgcttcgaccaagggcccatccgtgtttcctctggctcccagcagcaagtctacaagcggaggaacagccgctctgggctgcctggtcaaggattactttcccgagcctgtgaccgtgtcctggaattctggcgctctgacaagcggcgtgcacacctttccagctgtgctgcaaagcagcggcctgtactctctgagcagcgtggtcacagtgcctagctctagcctgggcacccagacctacatctgcaatgtgaaccacaagcctagcaacaccaaggtggacaagaaggtggaacccaagagctgcgataagacccacacatgtcctccatgtcctgctccagaactgctcggcggcccttctgtgttcctgtttcctccaaagcctaaggacaccctgatgatcagcagaacccctgaagtgacctgcgtggtggtggatgtgtctcacgaggaccccgaagtgaagttcaattggtacgtggacggcgtggaagtgcacaacgccaagaccaagcctagagaggaacagtacaacagcacctacagagtggtgtccgtgctgaccgtgctgcaccaggattggctgaacggcaaagagtacaagtgcaaggtgtccaacaaggccctgcctgctcctatcgagaaaaccatcagcaaggccaagggccagcctagggaaccccaggtttgtacccttcctccaagccgggatgagctgaccaagaaccaggtgtccctgagctgtgccgtgaagggcttctaccccagcgacattgccgtggaatgggagagcaatggccagcctgagaacaactacaagacaacccctcctgtgctggacagcgacggctcattcttcctggtgagcaagctgacagtcgacaagtccagatggcagcagggcaacgtgttcagttgcagcgtgatgcacgaggccctgcacaaccactacacccagaagtccctgagcctgtctcctgga

SEQ ID NO: 336 - protein, 574 aa, unidentified
  source 1..574: note = hrCD20_GShOKT3HholeLALAPA
QVQLVQPGAEVKKPGASVKMSCKASGYTFTSYNMHWVRQAPGRGLEWMGAIYPGNGDTSYNQKFQGRVTLTADKSTSTAYMELSSLESEDTAVYYCARSTYYGGDWYFNVWGAGTTVTVSAGGSGSQVQLVQSGAEVAKPGASVKVSCKASGYTFTRYTMHWVKQAPGQGLEWIGYINPSRGYTNYAQKFQGKATLTTDKSTSTAYMELSSLRSEDTAVYYCARYYDDHYSLDYWGQGTTLTVSSASTKGPSVFPLAPSSKSTSGGTAALGCLVKDYFPEPVTVSWNSGALTSGVHTFPAVLQSSGLYSLSSVVTVPSSSLGTQTYICNVNHKPSNTKVDKKVEPKSCDKTHTCPPCPAPEAAGGPSVFLFPPKPKDTLMISRTPEVTCVVVDVSHEDPEVKFNWYVDGVEVHNAKTKPREEQYNSTYRVVSVLTVLHQDWLNGKEYKCKVSNKALAAPIEKTISKAKGQPREPQVCTLPPSRDELTKNQVSLSCAVKGFYPSDIAVEWESNGQPENNYKTTPPVLDSDGSFFLVSKLTVDKSRWQQGNVFSCSVMHEALHNHYTQKSLSLSPG

SEQ ID NO: 337 - DNA, 1722 bp, synthetic construct
  source 1..1722: mol_type = other DNA; note = hrCD20_GShOKT3HholeLALAPA
caggttcagctggttcagcctggcgccgaagtgaaaaaacctggcgcctccgtgaagatgagctgcaaggccagcggctacaccttcaccagctacaacatgcactgggtccgacaggcccctggcagaggacttgaatggatgggcgccatctatcccggcaacggcgatacaagctacaaccagaaattccagggcagagtgaccctgaccgccgacaagagcacaagcaccgcctacatggaactgagcagcctggaaagcgaggacaccgccgtgtactactgtgccagaagcacctactacggcggcgactggtacttcaatgtgtggggagccggcaccaccgtgacagtttctgctggcggctccggaagccaggttcagctggttcagtctggcgccgaagtggctaaacctggcgcctccgtgaaggtgtcctgtaaagccagcggctacacattcacccggtacaccatgcactgggtcaagcaggctccaggacaaggcttggagtggatcggctacatcaaccctagccggggctacaccaattacgcccagaagttccagggcaaggccacactgaccaccgacaagagcacaagcaccgcctacatggaactgagcagcctgagaagcgaggacaccgccgtgtactactgtgcccggtactacgacgaccactacagcctggattattggggccagggcacaaccctgaccgtgtcatctgcttcgaccaagggcccatccgtgtttcctctggctcccagcagcaagtctacaagcggaggaacagccgctctgggctgcctggtcaaggattactttcccgagcctgtgaccgtgtcctggaattctggcgctctgacaagcggcgtgcacacctttccagctgtgctgcaaagcagcggcctgtactctctgagcagcgtggtcacagtgcctagctctagcctgggcacccagacctacatctgcaatgtgaaccacaagcctagcaacaccaaggtggacaagaaggtggaacccaagagctgcgataagacccacacatgtcctccatgtcctgctccagaagctgctggcggcccttctgtgttcctgtttcctccaaagcctaaggacaccctgatgatcagcagaacccctgaagtgacctgcgtggtggtggatgtgtctcacgaggaccccgaagtgaagttcaattggtacgtggacggcgtggaagtgcacaacgccaagaccaagcctagagaggaacagtacaacagcacctacagagtggtgtccgtgctgaccgtgctgcaccaggattggctgaacggcaaagagtacaagtgcaaggtgtccaacaaggccctggccgctcctatcgagaaaaccatcagcaaggccaagggccagcctagggaaccccaggtttgtacccttcctccaagccgggatgagctgaccaagaaccaggtgtccctgagctgtgccgtgaagggcttctaccccagcgacattgccgtggaatgggagagcaatggccagcctgagaacaactacaagacaacccctcctgtgctggacagcgacggctcattcttcctggtgagcaagctgacagtcgacaagtccagatggcagcagggcaacgtgttcagttgcagcgtgatgcacgaggccctgcacaaccactacacccagaagtccctgagcctgtctcctgga

SEQ ID NO: 338 - protein, 332 aa, synthetic construct
  source 1..332: note = hrCD19_sshep12hOKT3L
DIQLTQSPSFLSASVGDRVTITCKASQSVDYSGDSYLNWYQQKPGKAPKLLIYDASNLVSGVPSRFSGSGSGTEFTLTISSLQPEDFATYYCQQSTENPWTFGCGTKLEIKASTRKAGGDIQLTQSPSSLSASVGDRVTITCRASQSISYLNWYQQKPGKSPKRWIYDTSKLASGVPSRFSGSGSGTDYTLTISSMQPEDAATYYCQQWSSNPLTFGGGTKVEIKRTVAAPSVFIFPPSDEQLKSGTASVVCLLNNFYPREAKVQWKVDNALQSGNSQESVTEQDSKDSTYSLSSTLTLSKADYEKHKVYACEVTHQGLSSPVTKSFNRGEC

SEQ ID NO: 339 - DNA, 996 bp, synthetic construct
  source 1..996: mol_type = other DNA; note = hrCD19_sshep12hOKT3L
gacatccagctgacccagtctccaagctttctgagcgccagcgtgggcgacagagtgaccatcacatgtaaagccagccagagcgtggactacagcggcgacagctacctgaactggtatcagcagaagcccggcaaggcccctaagctgctgatctacgacgcctccaatctggtgtccggcgtgcccagcagattttctggctctggaagcggcaccgagttcaccctgaccatatctagcctgcagcctgaggacttcgccacctactactgccagcagagcacagagaacccctggacatttggctgcggaacaaagctggaaatcaaggctagcacacggaaggctggcggagacatccagctgacacagagcccttctagcctgtctgccagcgtgggcgacagagtgaccatcacatgtagagccagccagagcatcagctacctgaactggtatcagcagaagcccggcaagagccccaagcggtggatctacgatacaagcaagctggcctctggcgtgcccagcagattttctggctctggcagcggcaccgactacaccctgacaatcagcagcatgcagcctgaggatgccgccacctactactgccagcagtggtccagcaatcccctgacatttggcggaggcaccaaggtggaaatcaagcgtacggtggccgctcccagcgtgttcatcttcccacctagcgacgagcagctgaagtccggcacagcctctgtcgtgtgcctgctgaacaacttctacccccgcgaggccaaagtgcagtggaaggtggacaacgccctgcagagcggcaacagccaggaaagcgtgaccgagcaggacagcaaggactccacctacagcctgagcagcaccctgacactgagcaaggccgactacgagaagcacaaggtgtacgcctgcgaagtgacccaccagggcctgtctagccccgtgaccaagagcttcaaccggggcgagtgt

SEQ ID NO: 340 - protein, 332 aa, synthetic construct
  source 1..332: note = hrCD19_hep12hOKT3L
DIQLTQSPSFLSASVGDRVTITCKASQSVDYSGDSYLNWYQQKPGKAPKLLIYDASNLVSGVPSRFSGSGSGTEFTLTISSLQPEDFATYYCQQSTENPWTFGGGTKLEIKASTRKAGGDIQLTQSPSSLSASVGDRVTITCRASQSISYLNWYQQKPGKSPKRWIYDTSKLASGVPSRFSGSGSGTDYTLTISSMQPEDAATYYCQQWSSNPLTFGGGTKVEIKRTVAAPSVFIFPPSDEQLKSGTASVVCLLNNFYPREAKVQWKVDNALQSGNSQESVTEQDSKDSTYSLSSTLTLSKADYEKHKVYACEVTHQGLSSPVTKSFNRGEC

SEQ ID NO: 341 - DNA, 996 bp, synthetic construct
  source 1..996: mol_type = other DNA; note = hrCD19_hep12hOKT3L
gacatccagctgacccagtctccaagctttctgagcgccagcgtgggcgacagagtgaccatcacatgtaaagccagccagagcgtggactacagcggcgacagctacctgaactggtatcagcagaagcccggcaaggcccctaagctgctgatctacgacgcctccaatctggtgtccggcgtgcccagcagattttctggctctggaagcggcaccgagttcaccctgaccatatctagcctgcagcctgaggacttcgccacctactactgccagcagagcacagagaacccctggacatttggcggcggaacaaagctggaaatcaaggctagcacacggaaggctggcggagacatccagctgacacagagcccttctagcctgtctgccagcgtgggcgacagagtgaccatcacatgtagagccagccagagcatcagctacctgaactggtatcagcagaagcccggcaagagccccaagcggtggatctacgatacaagcaagctggcctctggcgtgcccagcagattttctggctctggcagcggcaccgactacaccctgacaatcagcagcatgcagcctgaggatgccgccacctactactgccagcagtggtccagcaatcccctgacatttggcggaggcaccaaggtggaaatcaagcgtacggtggccgctcccagcgtgttcatcttcccacctagcgacgagcagctgaagtccggcacagcctctgtcgtgtgcctgctgaacaacttctacccccgcgaggccaaagtgcagtggaaggtggacaacgccctgcagagcggcaacagccaggaaagcgtgaccgagcaggacagcaaggactccacctacagcctgagcagcaccctgacactgagcaaggccgactacgagaagcacaaggtgtacgcctgcgaagtgacccaccagggcctgtctagccccgtgaccaagagcttcaaccggggcgagtgt

SEQ ID NO: 342 - protein, 580 aa, synthetic construct
  source 1..580: note = hrCD19_cl5hOKT3Hhole
QVQLVQSGAEVKKPGSSVKVSCKASGYAFSSYWMNWVRQAPGQGLEWMGQIWPGDSDTNYAQKFQGRVTITADESTSTAYMELSSLRSEDTAVYYCARRETTTVGRYYYAMDYWGQGTTVTVSSASTRKAGGQVQLVQSGAEVAKPGASVKVSCKASGYTFTRYTMHWVKQAPGQGLEWIGYINPSRGYTNYAQKFQGKATLTTDKSTSTAYMELSSLRSEDTAVYYCARYYDDHYSLDYWGQGTTLTVSSASTKGPSVFPLAPSSKSTSGGTAALGCLVKDYFPEPVTVSWNSGALTSGVHTFPAVLQSSGLYSLSSVVTVPSSSLGTQTYICNVNHKPSNTKVDKKVEPKSCDKTHTCPPCPAPELLGGPSVFLFPPKPKDTLMISRTPEVTCVVVDVSHEDPEVKFNWYVDGVEVHNAKTKPREEQYNSTYRVVSVLTVLHQDWLNGKEYKCKVSNKALPAPIEKTISKAKGQPREPQVCTLPPSRDELTKNQVSLSCAVKGFYPSDIAVEWESNGQPENNYKTTPPVLDSDGSFFLVSKLTVDKSRWQQGNVFSCSVMHEALHNHYTQKSLSLSPG

SEQ ID NO: 343 - DNA, 1740 bp, synthetic construct
  source 1..1740: mol_type = other DNA; note = hrCD19_cl5hOKT3Hhole
caggttcagctggttcagtctggcgccgaagtgaagaaacctggcagcagcgtgaaggtgtcctgcaaggcctctggctacgccttcagcagctactggatgaactgggtccgacaggcccctggacaaggcttggaatggatgggccaaatctggcctggcgacagcgacaccaattacgcccagaaattccagggcagagtgaccatcaccgccgacgagtctacaagcaccgcctacatggaactgagcagcctgagaagcgaggacaccgccgtgtactactgtgccagacgggaaaccaccaccgtgggcagatattactacgccatggactactggggccagggcaccacagtgacagtctcttctgctagcacacggaaggctggcggacaggttcagctggttcagtctggcgccgaagtggctaaacctggcgcctccgtgaaggtgtcctgtaaagccagcggctacacattcacccggtacaccatgcactgggtcaagcaggctccaggacaaggcttggagtggatcggctacatcaaccctagccggggctacaccaattacgcccagaagttccagggcaaggccacactgaccaccgacaagagcacaagcaccgcctacatggaactgagcagcctgagaagcgaggacaccgccgtgtactactgtgcccggtactacgacgaccactacagcctggattattggggccagggcacaaccctgaccgtgtcatctgcttcgaccaagggcccatccgtgtttcctctggctcccagcagcaagtctacaagcggaggaacagccgctctgggctgcctggtcaaggattactttcccgagcctgtgaccgtgtcctggaattctggcgctctgacaagcggcgtgcacacctttccagctgtgctgcaaagcagcggcctgtactctctgagcagcgtggtcacagtgcctagctctagcctgggcacccagacctacatctgcaatgtgaaccacaagcctagcaacaccaaggtggacaagaaggtggaacccaagagctgcgataagacccacacatgtcctccatgtcctgctccagaactgctcggcggcccttctgtgttcctgtttcctccaaagcctaaggacaccctgatgatcagcagaacccctgaagtgacctgcgtggtggtggatgtgtctcacgaggaccccgaagtgaagttcaattggtacgtggacggcgtggaagtgcacaacgccaagaccaagcctagagaggaacagtacaacagcacctacagagtggtgtccgtgctgaccgtgctgcaccaggattggctgaacggcaaagagtacaagtgcaaggtgtccaacaaggccctgcctgctcctatcgagaaaaccatcagcaaggccaagggccagcctagggaaccccaggtttgtacccttcctccaagccgggatgagctgaccaagaaccaggtgtccctgagctgtgccgtgaagggcttctaccccagcgacattgccgtggaatgggagagcaatggccagcctgagaacaactacaagacaacccctcctgtgctggacagcgacggctcattcttcctggtgagcaagctgacagtcgacaagtccagatggcagcagggcaacgtgttcagttgcagcgtgatgcacgaggccctgcacaaccactacacccagaagtccctgagcctgtctcctgga

SEQ ID NO: 344 - protein, 580 aa, synthetic construct
  source 1..580: note = hrCD19_cl5hOKT3HholeLALAPA
QVQLVQSGAEVKKPGSSVKVSCKASGYAFSSYWMNWVRQAPGQGLEWMGQIWPGDSDTNYAQKFQGRVTITADESTSTAYMELSSLRSEDTAVYYCARRETTTVGRYYYAMDYWGQGTTVTVSSASTRKAGGQVQLVQSGAEVAKPGASVKVSCKASGYTFTRYTMHWVKQAPGQGLEWIGYINPSRGYTNYAQKFQGKATLTTDKSTSTAYMELSSLRSEDTAVYYCARYYDDHYSLDYWGQGTTLTVSSASTKGPSVFPLAPSSKSTSGGTAALGCLVKDYFPEPVTVSWNSGALTSGVHTFPAVLQSSGLYSLSSVVTVPSSSLGTQTYICNVNHKPSNTKVDKKVEPKSCDKTHTCPPCPAPEAAGGPSVFLFPPKPKDTLMISRTPEVTCVVVDVSHEDPEVKFNWYVDGVEVHNAKTKPREEQYNSTYRVVSVLTVLHQDWLNGKEYKCKVSNKALAAPIEKTISKAKGQPREPQVCTLPPSRDELTKNQVSLSCAVKGFYPSDIAVEWESNGQPENNYKTTPPVLDSDGSFFLVSKLTVDKSRWQQGNVFSCSVMHEALHNHYTQKSLSLSPG

SEQ ID NO: 345 - DNA, 1740 bp, synthetic construct
  source 1..1740: mol_type = other DNA; note = hrCD19_cl5hOKT3HholeLALAPA
caggttcagctggttcagtctggcgccgaagtgaagaaacctggcagcagcgtgaaggtgtcctgcaaggcctctggctacgccttcagcagctactggatgaactgggtccgacaggcccctggacaaggcttggaatggatgggccaaatctggcctggcgacagcgacaccaattacgcccagaaattccagggcagagtgaccatcaccgccgacgagtctacaagcaccgcctacatggaactgagcagcctgagaagcgaggacaccgccgtgtactactgtgccagacgggaaaccaccaccgtgggcagatattactacgccatggactactggggccagggcaccacagtgacagtctcttctgctagcacacggaaggctggcggacaggttcagctggttcagtctggcgccgaagtggctaaacctggcgcctccgtgaaggtgtcctgtaaagccagcggctacacattcacccggtacaccatgcactgggtcaagcaggctccaggacaaggcttggagtggatcggctacatcaaccctagccggggctacaccaattacgcccagaagttccagggcaaggccacactgaccaccgacaagagcacaagcaccgcctacatggaactgagcagcctgagaagcgaggacaccgccgtgtactactgtgcccggtactacgacgaccactacagcctggattattggggccagggcacaaccctgaccgtgtcatctgcttcgaccaagggcccatccgtgtttcctctggctcccagcagcaagtctacaagcggaggaacagccgctctgggctgcctggtcaaggattactttcccgagcctgtgaccgtgtcctggaattctggcgctctgacaagcggcgtgcacacctttccagctgtgctgcaaagcagcggcctgtactctctgagcagcgtggtcacagtgcctagctctagcctgggcacccagacctacatctgcaatgtgaaccacaagcctagcaacaccaaggtggacaagaaggtggaacccaagagctgcgataagacccacacatgtcctccatgtcctgctccagaagctgctggcggcccttctgtgttcctgtttcctccaaagcctaaggacaccctgatgatcagcagaacccctgaagtgacctgcgtggtggtggatgtgtctcacgaggaccccgaagtgaagttcaattggtacgtggacggcgtggaagtgcacaacgccaagaccaagcctagagaggaacagtacaacagcacctacagagtggtgtccgtgctgaccgtgctgcaccaggattggctgaacggcaaagagtacaagtgcaaggtgtccaacaaggccctggccgctcctatcgagaaaaccatcagcaaggccaagggccagcctagggaaccccaggtttgtacccttcctccaagccgggatgagctgaccaagaaccaggtgtccctgagctgtgccgtgaagggcttctaccccagcgacattgccgtggaatgggagagcaatggccagcctgagaacaactacaagacaacccctcctgtgctggacagcgacggctcattcttcctggtgagcaagctgacagtcgacaagtccagatggcagcagggcaacgtgttcagttgcagcgtgatgcacgaggccctgcacaaccactacacccagaagtccctgagcctgtctcctgga

SEQ ID NO: 346 - protein, 580 aa, synthetic construct
  source 1..580: note = hrCD19_sscl5hOKT3Hhole
QVQLVQSGAEVKKPGSSVKVSCKASGYAFSSYWMNWVRQAPGQCLEWMGQIWPGDSDTNYAQKFQGRVTITADESTSTAYMELSSLRSEDTAVYYCARRETTTVGRYYYAMDYWGQGTTVTVSSASTRKAGGQVQLVQSGAEVAKPGASVKVSCKASGYTFTRYTMHWVKQAPGQGLEWIGYINPSRGYTNYAQKFQGKATLTTDKSTSTAYMELSSLRSEDTAVYYCARYYDDHYSLDYWGQGTTLTVSSASTKGPSVFPLAPSSKSTSGGTAALGCLVKDYFPEPVTVSWNSGALTSGVHTFPAVLQSSGLYSLSSVVTVPSSSLGTQTYICNVNHKPSNTKVDKKVEPKSCDKTHTCPPCPAPELLGGPSVFLFPPKPKDTLMISRTPEVTCVVVDVSHEDPEVKFNWYVDGVEVHNAKTKPREEQYNSTYRVVSVLTVLHQDWLNGKEYKCKVSNKALPAPIEKTISKAKGQPREPQVCTLPPSRDELTKNQVSLSCAVKGFYPSDIAVEWESNGQPENNYKTTPPVLDSDGSFFLVSKLTVDKSRWQQGNVFSCSVMHEALHNHYTQKSLSLSPG

SEQ ID NO: 347 - DNA, 1740 bp, synthetic construct
  source 1..1740: mol_type = other DNA; note = hrCD19_sscl5hOKT3Hhole
caggttcagctggttcagtctggcgccgaagtgaagaaacctggcagcagcgtgaaggtgtcctgcaaggcctctggctacgccttcagcagctactggatgaactgggtccgacaggcccctggacaatgcttggaatggatgggccaaatctggcctggcgacagcgacaccaattacgcccagaaattccagggcagagtgaccatcaccgccgacgagtctacaagcaccgcctacatggaactgagcagcctgagaagcgaggacaccgccgtgtactactgtgccagacgggaaaccaccaccgtgggcagatattactacgccatggactactggggccagggcaccacagtgacagtctcttctgctagcacacggaaggctggcggacaggttcagctggttcagtctggcgccgaagtggctaaacctggcgcctccgtgaaggtgtcctgtaaagccagcggctacacattcacccggtacaccatgcactgggtcaagcaggctccaggacaaggcttggagtggatcggctacatcaaccctagccggggctacaccaattacgcccagaagttccagggcaaggccacactgaccaccgacaagagcacaagcaccgcctacatggaactgagcagcctgagaagcgaggacaccgccgtgtactactgtgcccggtactacgacgaccactacagcctggattattggggccagggcacaaccctgaccgtgtcatctgcttcgaccaagggcccatccgtgtttcctctggctcccagcagcaagtctacaagcggaggaacagccgctctgggctgcctggtcaaggattactttcccgagcctgtgaccgtgtcctggaattctggcgctctgacaagcggcgtgcacacctttccagctgtgctgcaaagcagcggcctgtactctctgagcagcgtggtcacagtgcctagctctagcctgggcacccagacctacatctgcaatgtgaaccacaagcctagcaacaccaaggtggacaagaaggtggaacccaagagctgcgataagacccacacatgtcctccatgtcctgctccagaactgctcggcggcccttctgtgttcctgtttcctccaaagcctaaggacaccctgatgatcagcagaacccctgaagtgacctgcgtggtggtggatgtgtctcacgaggaccccgaagtgaagttcaattggtacgtggacggcgtggaagtgcacaacgccaagaccaagcctagagaggaacagtacaacagcacctacagagtggtgtccgtgctgaccgtgctgcaccaggattggctgaacggcaaagagtacaagtgcaaggtgtccaacaaggccctgcctgctcctatcgagaaaaccatcagcaaggccaagggccagcctagggaaccccaggtttgtacccttcctccaagccgggatgagctgaccaagaaccaggtgtccctgagctgtgccgtgaagggcttctaccccagcgacattgccgtggaatgggagagcaatggccagcctgagaacaactacaagacaacccctcctgtgctggacagcgacggctcattcttcctggtgagcaagctgacagtcgacaagtccagatggcagcagggcaacgtgttcagttgcagcgtgatgcacgaggccctgcacaaccactacacccagaagtccctgagcctgtctcctgga

SEQ ID NO: 348 - protein, 580 aa, synthetic construct
  source 1..580: note = hrCD19_sscl5hOKT3HholeLALAPA
QVQLVQSGAEVKKPGSSVKVSCKASGYAFSSYWMNWVRQAPGQCLEWMGQIWPGDSDTNYAQKFQGRVTITADESTSTAYMELSSLRSEDTAVYYCARRETTTVGRYYYAMDYWGQGTTVTVSSASTRKAGGQVQLVQSGAEVAKPGASVKVSCKASGYTFTRYTMHWVKQAPGQGLEWIGYINPSRGYTNYAQKFQGKATLTTDKSTSTAYMELSSLRSEDTAVYYCARYYDDHYSLDYWGQGTTLTVSSASTKGPSVFPLAPSSKSTSGGTAALGCLVKDYFPEPVTVSWNSGALTSGVHTFPAVLQSSGLYSLSSVVTVPSSSLGTQTYICNVNHKPSNTKVDKKVEPKSCDKTHTCPPCPAPEAAGGPSVFLFPPKPKDTLMISRTPEVTCVVVDVSHEDPEVKFNWYVDGVEVHNAKTKPREEQYNSTYRVVSVLTVLHQDWLNGKEYKCKVSNKALAAPIEKTISKAKGQPREPQVCTLPPSRDELTKNQVSLSCAVKGFYPSDIAVEWESNGQPENNYKTTPPVLDSDGSFFLVSKLTVDKSRWQQGNVFSCSVMHEALHNHYTQKSLSLSPG

SEQ ID NO: 349 - DNA, 1740 bp, synthetic construct
  source 1..1740: mol_type = other DNA; note = hrCD19_sscl5hOKT3HholeLALAPA
caggttcagctggttcagtctggcgccgaagtgaagaaacctggcagcagcgtgaaggtgtcctgcaaggcctctggctacgccttcagcagctactggatgaactgggtccgacaggcccctggacaatgcttggaatggatgggccaaatctggcctggcgacagcgacaccaattacgcccagaaattccagggcagagtgaccatcaccgccgacgagtctacaagcaccgcctacatggaactgagcagcctgagaagcgaggacaccgccgtgtactactgtgccagacgggaaaccaccaccgtgggcagatattactacgccatggactactggggccagggcaccacagtgacagtctcttctgctagcacacggaaggctggcggacaggttcagctggttcagtctggcgccgaagtggctaaacctggcgcctccgtgaaggtgtcctgtaaagccagcggctacacattcacccggtacaccatgcactgggtcaagcaggctccaggacaaggcttggagtggatcggctacatcaaccctagccggggctacaccaattacgcccagaagttccagggcaaggccacactgaccaccgacaagagcacaagcaccgcctacatggaactgagcagcctgagaagcgaggacaccgccgtgtactactgtgcccggtactacgacgaccactacagcctggattattggggccagggcacaaccctgaccgtgtcatctgcttcgaccaagggcccatccgtgtttcctctggctcccagcagcaagtctacaagcggaggaacagccgctctgggctgcctggtcaaggattactttcccgagcctgtgaccgtgtcctggaattctggcgctctgacaagcggcgtgcacacctttccagctgtgctgcaaagcagcggcctgtactctctgagcagcgtggtcacagtgcctagctctagcctgggcacccagacctacatctgcaatgtgaaccacaagcctagcaacaccaaggtggacaagaaggtggaacccaagagctgcgataagacccacacatgtcctccatgtcctgctccagaagctgctggcggcccttctgtgttcctgtttcctccaaagcctaaggacaccctgatgatcagcagaacccctgaagtgacctgcgtggtggtggatgtgtctcacgaggaccccgaagtgaagttcaattggtacgtggacggcgtggaagtgcacaacgccaagaccaagcctagagaggaacagtacaacagcacctacagagtggtgtccgtgctgaccgtgctgcaccaggattggctgaacggcaaagagtacaagtgcaaggtgtccaacaaggccctggccgctcctatcgagaaaaccatcagcaaggccaagggccagcctagggaaccccaggtttgtacccttcctccaagccgggatgagctgaccaagaaccaggtgtccctgagctgtgccgtgaagggcttctaccccagcgacattgccgtggaatgggagagcaatggccagcctgagaacaactacaagacaacccctcctgtgctggacagcgacggctcattcttcctggtgagcaagctgacagtcgacaagtccagatggcagcagggcaacgtgttcagttgcagcgtgatgcacgaggccctgcacaaccactacacccagaagtccctgagcctgtctcctgga

SEQ ID NO: 350 - protein, 329 aa, synthetic construct
  source 1..329: note = hrCD19_GShOKT3L
DIQLTQSPSFLSASVGDRVTITCKASQSVDYSGDSYLNWYQQKPGKAPKLLIYDASNLVSGVPSRFSGSGSGTEFTLTISSLQPEDFATYYCQQSTENPWTFGGGTKLEIKGGSGSDIQLTQSPSSLSASVGDRVTITCRASQSISYLNWYQQKPGKSPKRWIYDTSKLASGVPSRFSGSGSGTDYTLTISSMQPEDAATYYCQQWSSNPLTFGGGTKVEIKRTVAAPSVFIFPPSDEQLKSGTASVVCLLNNFYPREAKVQWKVDNALQSGNSQESVTEQDSKDSTYSLSSTLTLSKADYEKHKVYACEVTHQGLSSPVTKSFNRGEC

SEQ ID NO: 351 - DNA, 987 bp, synthetic construct
  source 1..987: mol_type = other DNA; note = hrCD19_GShOKT3L
gacatccagctgacccagtctccaagctttctgagcgccagcgtgggcgacagagtgaccatcacatgtaaagccagccagagcgtggactacagcggcgacagctacctgaactggtatcagcagaagcccggcaaggcccctaagctgctgatctacgacgcctccaatctggtgtccggcgtgcccagcagattttctggctctggaagcggcaccgagttcaccctgaccatatctagcctgcagcctgaggacttcgccacctactactgccagcagagcacagagaacccctggacatttggcggcggaacaaagctggaaatcaagggcggctccggaagcgacatccagctgacacagagcccttctagcctgtctgccagcgtgggcgacagagtgaccatcacatgtagagccagccagagcatcagctacctgaactggtatcagcagaagcccggcaagagccccaagcggtggatctacgatacaagcaagctggcctctggcgtgcccagcagattttctggctctggcagcggcaccgactacaccctgacaatcagcagcatgcagcctgaggatgccgccacctactactgccagcagtggtccagcaatcccctgacatttggcggaggcaccaaggtggaaatcaagcgtacggtggccgctcccagcgtgttcatcttcccacctagcgacgagcagctgaagtccggcacagcctctgtcgtgtgcctgctgaacaacttctacccccgcgaggccaaagtgcagtggaaggtggacaacgccctgcagagcggcaacagccaggaaagcgtgaccgagcaggacagcaaggactccacctacagcctgagcagcaccctgacactgagcaaggccgactacgagaagcacaaggtgtacgcctgcgaagtgacccaccagggcctgtctagccccgtgaccaagagcttcaaccggggcgagtgt

SEQ ID NO: 352 - protein, 329 aa, synthetic construct
  source 1..329: note = hrCD19ss_GShOKT3L
DIQLTQSPSFLSASVGDRVTITCKASQSVDYSGDSYLNWYQQKPGKAPKLLIYDASNLVSGVPSRFSGSGSGTEFTLTISSLQPEDFATYYCQQSTENPWTFGCGTKLEIKGGSGSDIQLTQSPSSLSASVGDRVTITCRASQSISYLNWYQQKPGKSPKRWIYDTSKLASGVPSRFSGSGSGTDYTLTISSMQPEDAATYYCQQWSSNPLTFGGGTKVEIKRTVAAPSVFIFPPSDEQLKSGTASVVCLLNNFYPREAKVQWKVDNALQSGNSQESVTEQDSKDSTYSLSSTLTLSKADYEKHKVYACEVTHQGLSSPVTKSFNRGEC

SEQ ID NO: 353 - DNA, 987 bp, synthetic construct
  source 1..987: mol_type = other DNA; note = hrCD19ss_GShOKT3L
gacatccagctgacccagtctccaagctttctgagcgccagcgtgggcgacagagtgaccatcacatgtaaagccagccagagcgtggactacagcggcgacagctacctgaactggtatcagcagaagcccggcaaggcccctaagctgctgatctacgacgcctccaatctggtgtccggcgtgcccagcagattttctggctctggaagcggcaccgagttcaccctgaccatatctagcctgcagcctgaggacttcgccacctactactgccagcagagcacagagaacccctggacatttggctgcggaacaaagctggaaatcaagggcggctccggaagcgacatccagctgacacagagcccttctagcctgtctgccagcgtgggcgacagagtgaccatcacatgtagagccagccagagcatcagctacctgaactggtatcagcagaagcccggcaagagccccaagcggtggatctacgatacaagcaagctggcctctggcgtgcccagcagattttctggctctggcagcggcaccgactacaccctgacaatcagcagcatgcagcctgaggatgccgccacctactactgccagcagtggtccagcaatcccctgacatttggcggaggcaccaaggtggaaatcaagcgtacggtggccgctcccagcgtgttcatcttcccacctagcgacgagcagctgaagtccggcacagcctctgtcgtgtgcctgctgaacaacttctacccccgcgaggccaaagtgcagtggaaggtggacaacgccctgcagagcggcaacagccaggaaagcgtgaccgagcaggacagcaaggactccacctacagcctgagcagcaccctgacactgagcaaggccgactacgagaagcacaaggtgtacgcctgcgaagtgacccaccagggcctgtctagccccgtgaccaagagcttcaaccggggcgagtgt

SEQ ID NO: 354 - protein, 577 aa, synthetic construct
  source 1..577: note = hrCD19_GShOKT3Hhole
QVQLVQSGAEVKKPGSSVKVSCKASGYAFSSYWMNWVRQAPGQGLEWMGQIWPGDSDTNYAQKFQGRVTITADESTSTAYMELSSLRSEDTAVYYCARRETTTVGRYYYAMDYWGQGTTVTVSSGGSGSQVQLVQSGAEVAKPGASVKVSCKASGYTFTRYTMHWVKQAPGQGLEWIGYINPSRGYTNYAQKFQGKATLTTDKSTSTAYMELSSLRSEDTAVYYCARYYDDHYSLDYWGQGTTLTVSSASTKGPSVFPLAPSSKSTSGGTAALGCLVKDYFPEPVTVSWNSGALTSGVHTFPAVLQSSGLYSLSSVVTVPSSSLGTQTYICNVNHKPSNTKVDKKVEPKSCDKTHTCPPCPAPELLGGPSVFLFPPKPKDTLMISRTPEVTCVVVDVSHEDPEVKFNWYVDGVEVHNAKTKPREEQYNSTYRVVSVLTVLHQDWLNGKEYKCKVSNKALPAPIEKTISKAKGQPREPQVCTLPPSRDELTKNQVSLSCAVKGFYPSDIAVEWESNGQPENNYKTTPPVLDSDGSFFLVSKLTVDKSRWQQGNVFSCSVMHEALHNHYTQKSLSLSPG

SEQ ID NO: 355 - DNA, 1731 bp, synthetic construct
  source 1..1731: mol_type = other DNA; note = hrCD19_GShOKT3Hhole
caggttcagctggttcagtctggcgccgaagtgaagaaacctggcagcagcgtgaaggtgtcctgcaaggcctctggctacgccttcagcagctactggatgaactgggtccgacaggcccctggacaaggcttggaatggatgggccaaatctggcctggcgacagcgacaccaattacgcccagaaattccagggcagagtgaccatcaccgccgacgagtctacaagcaccgcctacatggaactgagcagcctgagaagcgaggacaccgccgtgtactactgtgccagacgggaaaccaccaccgtgggcagatattactacgccatggactactggggccagggcaccacagtgacagtctcttctggcggctccggaagccaggttcagctggttcagtctggcgccgaagtggctaaacctggcgcctccgtgaaggtgtcctgtaaagccagcggctacacattcacccggtacaccatgcactgggtcaagcaggctccaggacaaggcttggagtggatcggctacatcaaccctagccggggctacaccaattacgcccagaagttccagggcaaggccacactgaccaccgacaagagcacaagcaccgcctacatggaactgagcagcctgagaagcgaggacaccgccgtgtactactgtgcccggtactacgacgaccactacagcctggattattggggccagggcacaaccctgaccgtgtcatctgcttcgaccaagggcccatccgtgtttcctctggctcccagcagcaagtctacaagcggaggaacagccgctctgggctgcctggtcaaggattactttcccgagcctgtgaccgtgtcctggaattctggcgctctgacaagcggcgtgcacacctttccagctgtgctgcaaagcagcggcctgtactctctgagcagcgtggtcacagtgcctagctctagcctgggcacccagacctacatctgcaatgtgaaccacaagcctagcaacaccaaggtggacaagaaggtggaacccaagagctgcgataagacccacacatgtcctccatgtcctgctccagaactgctcggcggcccttctgtgttcctgtttcctccaaagcctaaggacaccctgatgatcagcagaacccctgaagtgacctgcgtggtggtggatgtgtctcacgaggaccccgaagtgaagttcaattggtacgtggacggcgtggaagtgcacaacgccaagaccaagcctagagaggaacagtacaacagcacctacagagtggtgtccgtgctgaccgtgctgcaccaggattggctgaacggcaaagagtacaagtgcaaggtgtccaacaaggccctgcctgctcctatcgagaaaaccatcagcaaggccaagggccagcctagggaaccccaggtttgtacccttcctccaagccgggatgagctgaccaagaaccaggtgtccctgagctgtgccgtgaagggcttctaccccagcgacattgccgtggaatgggagagcaatggccagcctgagaacaactacaagacaacccctcctgtgctggacagcgacggctcattcttcctggtgagcaagctgacagtcgacaagtccagatggcagcagggcaacgtgttcagttgcagcgtgatgcacgaggccctgcacaaccactacacccagaagtccctgagcctgtctcctgga

SEQ ID NO: 356 - protein, 577 aa, synthetic construct
  source 1..577: note = hrCD19_GShOKT3HholeLALAPA
QVQLVQSGAEVKKPGSSVKVSCKASGYAFSSYWMNWVRQAPGQGLEWMGQIWPGDSDTNYAQKFQGRVTITADESTSTAYMELSSLRSEDTAVYYCARRETTTVGRYYYAMDYWGQGTTVTVSSGGSGSQVQLVQSGAEVAKPGASVKVSCKASGYTFTRYTMHWVKQAPGQGLEWIGYINPSRGYTNYAQKFQGKATLTTDKSTSTAYMELSSLRSEDTAVYYCARYYDDHYSLDYWGQGTTLTVSSASTKGPSVFPLAPSSKSTSGGTAALGCLVKDYFPEPVTVSWNSGALTSGVHTFPAVLQSSGLYSLSSVVTVPSSSLGTQTYICNVNHKPSNTKVDKKVEPKSCDKTHTCPPCPAPEAAGGPSVFLFPPKPKDTLMISRTPEVTCVVVDVSHEDPEVKFNWYVDGVEVHNAKTKPREEQYNSTYRVVSVLTVLHQDWLNGKEYKCKVSNKALAAPIEKTISKAKGQPREPQVCTLPPSRDELTKNQVSLSCAVKGFYPSDIAVEWESNGQPENNYKTTPPVLDSDGSFFLVSKLTVDKSRWQQGNVFSCSVMHEALHNHYTQKSLSLSPG

SEQ ID NO: 357 - DNA, 1731 bp, synthetic construct
  source 1..1731: mol_type = other DNA; note = hrCD19_GShOKT3HholeLALAPA
caggttcagctggttcagtctggcgccgaagtgaagaaacctggcagcagcgtgaaggtgtcctgcaaggcctctggctacgccttcagcagctactggatgaactgggtccgacaggcccctggacaaggcttggaatggatgggccaaatctggcctggcgacagcgacaccaattacgcccagaaattccagggcagagtgaccatcaccgccgacgagtctacaagcaccgcctacatggaactgagcagcctgagaagcgaggacaccgccgtgtactactgtgccagacgggaaaccaccaccgtgggcagatattactacgccatggactactggggccagggcaccacagtgacagtctcttctggcggctccggaagccaggttcagctggttcagtctggcgccgaagtggctaaacctggcgcctccgtgaaggtgtcctgtaaagccagcggctacacattcacccggtacaccatgcactgggtcaagcaggctccaggacaaggcttggagtggatcggctacatcaaccctagccggggctacaccaattacgcccagaagttccagggcaaggccacactgaccaccgacaagagcacaagcaccgcctacatggaactgagcagcctgagaagcgaggacaccgccgtgtactactgtgcccggtactacgacgaccactacagcctggattattggggccagggcacaaccctgaccgtgtcatctgcttcgaccaagggcccatccgtgtttcctctggctcccagcagcaagtctacaagcggaggaacagccgctctgggctgcctggtcaaggattactttcccgagcctgtgaccgtgtcctggaattctggcgctctgacaagcggcgtgcacacctttccagctgtgctgcaaagcagcggcctgtactctctgagcagcgtggtcacagtgcctagctctagcctgggcacccagacctacatctgcaatgtgaaccacaagcctagcaacaccaaggtggacaagaaggtggaacccaagagctgcgataagacccacacatgtcctccatgtcctgctccagaagctgctggcggcccttctgtgttcctgtttcctccaaagcctaaggacaccctgatgatcagcagaacccctgaagtgacctgcgtggtggtggatgtgtctcacgaggaccccgaagtgaagttcaattggtacgtggacggcgtggaagtgcacaacgccaagaccaagcctagagaggaacagtacaacagcacctacagagtggtgtccgtgctgaccgtgctgcaccaggattggctgaacggcaaagagtacaagtgcaaggtgtccaacaaggccctggccgctcctatcgagaaaaccatcagcaaggccaagggccagcctagggaaccccaggtttgtacccttcctccaagccgggatgagctgaccaagaaccaggtgtccctgagctgtgccgtgaagggcttctaccccagcgacattgccgtggaatgggagagcaatggccagcctgagaacaactacaagacaacccctcctgtgctggacagcgacggctcattcttcctggtgagcaagctgacagtcgacaagtccagatggcagcagggcaacgtgttcagttgcagcgtgatgcacgaggccctgcacaaccactacacccagaagtccctgagcctgtctcctgga

SEQ ID NO: 358 - protein, 724 aa, synthetic construct
  source 1..724: note = hrCD19TgCD28csL1knobLALAPA
DIQLTQSPSFLSASVGDRVTITCKASQSVDYSGDSYLNWYQQKPGKAPKLLIYDASNLVSGVPSRFSGSGSGTEFTLTISSLQPEDFATYYCQQSTENPWTFGGGTKLEIKGGSSGDIQMTQSPSSLSASVGDRVTITCHASQNIYVWLNWYQQKPGKAPKLLIYKASNLHTGVPSRFSGSGSGTDFTLTISSLQPEDFATYYCQQGQTYPYTFGGGTKVEIKGGGGSGGSGSGGGGSASGSGQVQLVQSGAEVKKPGASVKVSCKASGYTFTSYYIHWVRQAPGQGLEWIGSIYPGNVNTNYNEKFKDRATLTVDTSISTAYMELSRLRSDDTAVYFCTRSHYGLDWNFDVWGQGTTVTVSSGGSSGQVQLVQSGAEVKKPGSSVKVSCKASGYAFSSYWMNWVRQAPGQGLEWMGQIWPGDSDTNYAQKFQGRVTITADESTSTAYMELSSLRSEDTAVYYCARRETTTVGRYYYAMDYWGQGTTVTVSSASGGSGDKTHTCPPCPAPEAAGGPSVFLFPPKPKDTLMISRTPEVTCVVVDVSHEDPEVKFNWYVDGVEVHNAKTKPREEQYNSTYRVVSVLTVLHQDWLNGKEYKCKVSNKALAAPIEKTISKAKGQPREPQVYTLPPCRDELTKNQVSLWCLVKGFYPSDIAVEWESNGQPENNYKTTPPVLDSDGSFFLYSKLTVDKSRWQQGNVFSCSVMHEALHNHYTQKSLSLSPG

SEQ ID NO: 359 - DNA, 2172 bp, synthetic construct
  source 1..2172: mol_type = other DNA; note = hrCD19TgCD28csL1knobLALAPA
gacatccagctgacccagtctccaagctttctgagcgccagcgtgggcgacagagtgaccatcacatgtaaagccagccagagcgtggactacagcggcgacagctacctgaactggtatcagcagaagcccggcaaggcccctaagctgctgatctacgacgcctccaatctggtgtccggcgtgcccagcagattttctggctctggaagcggcaccgagttcaccctgaccatatctagcctgcagcctgaggacttcgccacctactactgccagcagagcacagagaacccctggacatttggcggcggaacaaagctggaaatcaagggcggatcttctggagacatccagatgacacagagccctagcagcctgtctgccagcgtgggagacagagtgaccatcacatgtcacgccagccagaacatctacgtgtggctgaactggtatcagcagaagcccggcaaggcccctaagctgctgatctacaaggccagcaatctgcacaccggcgtgcccagcagattttctggctctggcagcggcaccgacttcaccctgaccatatctagcctgcagcctgaggacttcgccacctactattgtcagcagggccagacatacccctacacctttggcggcggaacaaaggtggaaatcaagggaggcggaggatctggcggatctggaagtggcggcggtggatctgcttctggctctggccaggttcagctggttcagtctggcgccgaagtgaagaaacctggcgcctctgtgaaggtgtcctgcaaggccagcggctacacctttaccagctactacatccactgggtccgacaggcccctggacaaggactggaatggatcggcagcatctaccccggcaacgtgaacaccaactacaacgagaagttcaaggaccgggccacactgaccgtggacacctctatcagcaccgcctacatggaactgagccggctgagatccgatgataccgccgtgtacttctgcaccagaagccactacggcctggactggaacttcgatgtgtggggccagggcaccaccgtgacagtttcttctggaggcagctctggccaggttcagctggttcagtctggcgccgaagtgaagaaacctggcagcagcgtgaaggtgtcctgcaaggcctctggctacgccttcagcagctactggatgaactgggtccgacaggcccctggacaaggcttggaatggatgggccaaatctggcctggcgacagcgacaccaattacgcccagaaattccagggcagagtgaccatcaccgccgacgagtctacaagcaccgcctacatggaactgagcagcctgagaagcgaggacaccgccgtgtactactgtgccagacgggaaaccaccaccgtgggcagatattactacgccatggactactggggccagggcaccacagtgacagtctcttctgcttctggcggctccggagataagacccacacatgtcctccatgtcctgctccagaagctgctggcggcccttctgtgttcctgtttcctccaaagcctaaggacaccctgatgatcagcagaacccctgaagtgacctgcgtggtggtggatgtgtctcacgaggaccccgaagtgaagttcaattggtacgtggacggcgtggaagtgcacaacgccaagaccaagcctagagaggaacagtacaacagcacctacagagtggtgtccgtgctgaccgtgctgcaccaggattggctgaacggcaaagagtacaagtgcaaggtgtccaacaaggccctggccgctcctatcgagaaaaccatcagcaaggccaagggccagcctagggaaccccaggtttacacccttcctccatgccgggatgagctgaccaagaaccaggtgtccctgtggtgtctcgtgaagggcttctaccccagcgacattgccgtggaatgggagagcaatggccagcctgagaacaactacaagacaacccctcctgtgctggacagcgacggctcattcttcctgtacagcaagctgacagtcgacaagtccagatggcagcagggcaacgtgttcagttgcagcgtgatgcacgaggccctgcacaaccactacacccagaagtccctgagcctgtctcctgga

SEQ ID NO: 360 - protein, 724 aa, synthetic construct
  source 1..724: note = hrCD19TgCD28csL1knob
DIQLTQSPSFLSASVGDRVTITCKASQSVDYSGDSYLNWYQQKPGKAPKLLIYDASNLVSGVPSRFSGSGSGTEFTLTISSLQPEDFATYYCQQSTENPWTFGGGTKLEIKGGSSGDIQMTQSPSSLSASVGDRVTITCHASQNIYVWLNWYQQKPGKAPKLLIYKASNLHTGVPSRFSGSGSGTDFTLTISSLQPEDFATYYCQQGQTYPYTFGGGTKVEIKGGGGSGGSGSGGGGSASGSGQVQLVQSGAEVKKPGASVKVSCKASGYTFTSYYIHWVRQAPGQGLEWIGSIYPGNVNTNYNEKFKDRATLTVDTSISTAYMELSRLRSDDTAVYFCTRSHYGLDWNFDVWGQGTTVTVSSGGSSGQVQLVQSGAEVKKPGSSVKVSCKASGYAFSSYWMNWVRQAPGQGLEWMGQIWPGDSDTNYAQKFQGRVTITADESTSTAYMELSSLRSEDTAVYYCARRETTTVGRYYYAMDYWGQGTTVTVSSASGGSGDKTHTCPPCPAPELLGGPSVFLFPPKPKDTLMISRTPEVTCVVVDVSHEDPEVKFNWYVDGVEVHNAKTKPREEQYNSTYRVVSVLTVLHQDWLNGKEYKCKVSNKALPAPIEKTISKAKGQPREPQVYTLPPCRDELTKNQVSLWCLVKGFYPSDIAVEWESNGQPENNYKTTPPVLDSDGSFFLYSKLTVDKSRWQQGNVFSCSVMHEALHNHYTQKSLSLSPG

SEQ ID NO: 361 - DNA, 2172 bp, synthetic construct
  source 1..2172: mol_type = other DNA; note = hrCD19TgCD28csL1knob
gacatccagctgacccagtctccaagctttctgagcgccagcgtgggcgacagagtgaccatcacatgtaaagccagccagagcgtggactacagcggcgacagctacctgaactggtatcagcagaagcccggcaaggcccctaagctgctgatctacgacgcctccaatctggtgtccggcgtgcccagcagattttctggctctggaagcggcaccgagttcaccctgaccatatctagcctgcagcctgaggacttcgccacctactactgccagcagagcacagagaacccctggacatttggcggcggaacaaagctggaaatcaagggcggatcttctggagacatccagatgacacagagccctagcagcctgtctgccagcgtgggagacagagtgaccatcacatgtcacgccagccagaacatctacgtgtggctgaactggtatcagcagaagcccggcaaggcccctaagctgctgatctacaaggccagcaatctgcacaccggcgtgcccagcagattttctggctctggcagcggcaccgacttcaccctgaccatatctagcctgcagcctgaggacttcgccacctactattgtcagcagggccagacatacccctacacctttggcggcggaacaaaggtggaaatcaagggaggcggaggatctggcggatctggaagtggcggcggtggatctgcttctggctctggccaggttcagctggttcagtctggcgccgaagtgaagaaacctggcgcctctgtgaaggtgtcctgcaaggccagcggctacacctttaccagctactacatccactgggtccgacaggcccctggacaaggactggaatggatcggcagcatctaccccggcaacgtgaacaccaactacaacgagaagttcaaggaccgggccacactgaccgtggacacctctatcagcaccgcctacatggaactgagccggctgagatccgatgataccgccgtgtacttctgcaccagaagccactacggcctggactggaacttcgatgtgtggggccagggcaccaccgtgacagtttcttctggaggcagctctggccaggttcagctggttcagtctggcgccgaagtgaagaaacctggcagcagcgtgaaggtgtcctgcaaggcctctggctacgccttcagcagctactggatgaactgggtccgacaggcccctggacaaggcttggaatggatgggccaaatctggcctggcgacagcgacaccaattacgcccagaaattccagggcagagtgaccatcaccgccgacgagtctacaagcaccgcctacatggaactgagcagcctgagaagcgaggacaccgccgtgtactactgtgccagacgggaaaccaccaccgtgggcagatattactacgccatggactactggggccagggcaccacagtgacagtctcttctgcttctggcggctccggagataagacccacacatgtcctccatgtcctgctccagaactgctcggcggcccttctgtgttcctgtttcctccaaagcctaaggacaccctgatgatcagcagaacccctgaagtgacctgcgtggtggtggatgtgtctcacgaggaccccgaagtgaagttcaattggtacgtggacggcgtggaagtgcacaacgccaagaccaagcctagagaggaacagtacaacagcacctacagagtggtgtccgtgctgaccgtgctgcaccaggattggctgaacggcaaagagtacaagtgcaaggtgtccaacaaggccctgcctgctcctatcgagaaaaccatcagcaaggccaagggccagcctagggaaccccaggtttacacccttcctccatgccgggatgagctgaccaagaaccaggtgtccctgtggtgtctcgtgaagggcttctaccccagcgacattgccgtggaatgggagagcaatggccagcctgagaacaactacaagacaacccctcctgtgctggacagcgacggctcattcttcctgtacagcaagctgacagtcgacaagtccagatggcagcagggcaacgtgttcagttgcagcgtgatgcacgaggccctgcacaaccactacacccagaagtccctgagcctgtctcctgga

SEQ ID NO: 362 - protein, 724 aa, synthetic construct
  source 1..724: note = TgCD28cshrCD19L1knobLALAPA
DIQMTQSPSSLSASVGDRVTITCHASQNIYVWLNWYQQKPGKAPKLLIYKASNLHTGVPSRFSGSGSGTDFTLTISSLQPEDFATYYCQQGQTYPYTFGGGTKVEIKGGSSGDIQLTQSPSFLSASVGDRVTITCKASQSVDYSGDSYLNWYQQKPGKAPKLLIYDASNLVSGVPSRFSGSGSGTEFTLTISSLQPEDFATYYCQQSTENPWTFGGGTKLEIKGGGGSGGSGSGGGGSASGSGQVQLVQSGAEVKKPGSSVKVSCKASGYAFSSYWMNWVRQAPGQGLEWMGQIWPGDSDTNYAQKFQGRVTITADESTSTAYMELSSLRSEDTAVYYCARRETTTVGRYYYAMDYWGQGTTVTVSSGGSSGQVQLVQSGAEVKKPGASVKVSCKASGYTFTSYYIHWVRQAPGQGLEWIGSIYPGNVNTNYNEKFKDRATLTVDTSISTAYMELSRLRSDDTAVYFCTRSHYGLDWNFDVWGQGTTVTVSSASGGSGDKTHTCPPCPAPEAAGGPSVFLFPPKPKDTLMISRTPEVTCVVVDVSHEDPEVKFNWYVDGVEVHNAKTKPREEQYNSTYRVVSVLTVLHQDWLNGKEYKCKVSNKALAAPIEKTISKAKGQPREPQVYTLPPCRDELTKNQVSLWCLVKGFYPSDIAVEWESNGQPENNYKTTPPVLDSDGSFFLYSKLTVDKSRWQQGNVFSCSVMHEALHNHYTQKSLSLSPG

SEQ ID NO: 363 - DNA, 2172 bp, synthetic construct
  source 1..2172: mol_type = other DNA; note = TgCD28cshrCD19L1knobLALAPA
gacatccagatgacacagagccctagcagcctgtctgccagcgtgggagacagagtgaccatcacatgtcacgccagccagaacatctacgtgtggctgaactggtatcagcagaagcccggcaaggcccctaagctgctgatctacaaggccagcaatctgcacaccggcgtgcccagcagattttctggctctggcagcggcaccgacttcaccctgaccatatctagcctgcagcctgaggacttcgccacctactattgtcagcagggccagacatacccctacacctttggcggcggaacaaaggtggaaatcaagggcggatcttctggagacatccagctgacccagtctccaagctttctgagcgccagcgtgggcgacagagtgaccatcacatgtaaagccagccagagcgtggactacagcggcgacagctacctgaactggtatcagcagaagcccggcaaggcccctaagctgctgatctacgacgcctccaatctggtgtccggcgtgcccagcagattttctggctctggaagcggcaccgagttcaccctgaccatatctagcctgcagcctgaggacttcgccacctactactgccagcagagcacagagaacccctggacatttggcggcggaacaaagctggaaatcaagggaggcggaggatctggcggatctggaagtggcggcggtggatctgcttctggctctggccaggttcagctggttcagtctggcgccgaagtgaagaaacctggcagcagcgtgaaggtgtcctgcaaggcctctggctacgccttcagcagctactggatgaactgggtccgacaggcccctggacaaggcttggaatggatgggccaaatctggcctggcgacagcgacaccaattacgcccagaaattccagggcagagtgaccatcaccgccgacgagtctacaagcaccgcctacatggaactgagcagcctgagaagcgaggacaccgccgtgtactactgtgccagacgggaaaccaccaccgtgggcagatattactacgccatggactactggggccagggcaccacagtgacagtctcttctggaggcagctctggccaggttcagctggttcagtctggcgccgaagtgaagaaacctggcgcctctgtgaaggtgtcctgcaaggccagcggctacacctttaccagctactacatccactgggtccgacaggcccctggacaaggactggaatggatcggcagcatctaccccggcaacgtgaacaccaactacaacgagaagttcaaggaccgggccacactgaccgtggacacctctatcagcaccgcctacatggaactgagccggctgagatccgatgataccgccgtgtacttctgcaccagaagccactacggcctggactggaacttcgatgtgtggggccagggcaccaccgtgacagtttcttctgcttctggcggctccggagataagacccacacatgtcctccatgtcctgctccagaagctgctggcggcccttctgtgttcctgtttcctccaaagcctaaggacaccctgatgatcagcagaacccctgaagtgacctgcgtggtggtggatgtgtctcacgaggaccccgaagtgaagttcaattggtacgtggacggcgtggaagtgcacaacgccaagaccaagcctagagaggaacagtacaacagcacctacagagtggtgtccgtgctgaccgtgctgcaccaggattggctgaacggcaaagagtacaagtgcaaggtgtccaacaaggccctggccgctcctatcgagaaaaccatcagcaaggccaagggccagcctagggaaccccaggtttacacccttcctccatgccgggatgagctgaccaagaaccaggtgtccctgtggtgtctcgtgaagggcttctaccccagcgacattgccgtggaatgggagagcaatggccagcctgagaacaactacaagacaacccctcctgtgctggacagcgacggctcattcttcctgtacagcaagctgacagtcgacaagtccagatggcagcagggcaacgtgttcagttgcagcgtgatgcacgaggccctgcacaaccactacacccagaagtccctgagcctgtctcctgga

SEQ ID NO: 364 - protein, 647 aa, synthetic construct
  source 1..647: note = TgCD28cshrCD19L1knob
LQPEDFATYYCQQGQTYPYTFGGGTKVEIKGGSSGDIQLTQSPSFLSASVGDRVTITCKASQSVDYSGDSYLNWYQQKPGKAPKLLIYDASNLVSGVPSRFSGSGSGTEFTLTISSLQPEDFATYYCQQSTENPWTFGGGTKLEIKGGGGSGGSGSGGGGSASGSGQVQLVQSGAEVKKPGSSVKVSCKASGYAFSSYWMNWVRQAPGQGLEWMGQIWPGDSDTNYAQKFQGRVTITADESTSTAYMELSSLRSEDTAVYYCARRETTTVGRYYYAMDYWGQGTTVTVSSGGSSGQVQLVQSGAEVKKPGASVKVSCKASGYTFTSYYIHWVRQAPGQGLEWIGSIYPGNVNTNYNEKFKDRATLTVDTSISTAYMELSRLRSDDTAVYFCTRSHYGLDWNFDVWGQGTTVTVSSASGGSGDKTHTCPPCPAPELLGGPSVFLFPPKPKDTLMISRTPEVTCVVVDVSHEDPEVKFNWYVDGVEVHNAKTKPREEQYNSTYRVVSVLTVLHQDWLNGKEYKCKVSNKALPAPIEKTISKAKGQPREPQVYTLPPCRDELTKNQVSLWCLVKGFYPSDIAVEWESNGQPENNYKTTPPVLDSDGSFFLYSKLTVDKSRWQQGNVFSCSVMHEALHNHYTQKSLSLSPG

SEQ ID NO: 365 - DNA, 2163 bp, synthetic construct
  source 1..2163: mol_type = other DNA; note = TgCD28cshrCD19L1knob
gacatcgtgatgacacagagccctgatagcctggccgtgtctctgggagagagagccaccatcaactgcaagagcagccagagcctgctgtacacctccagccagaagaactacctggcctggtatcagcagaagcccggccagcctcctaagctgctgatctactgggccagcaccagagaaagcggcgtgcccgatagattttctggctctggcagcggcaccgacttcaccctgacaatttctagcctgcaagccgaggacgtggccgtgtactactgccagcagtactacgcttacccctggacctttggcggaggcaccaagctggaaatcaagggcggatcttctggagacatccagatgacacagagccctagcagcctgtctgccagcgtgggagacagagtgaccatcacatgtcacgccagccagaacatctacgtgtggctgaactggtatcagcagaagcccggcaaggcccctaagctgctgatctacaaggccagcaatctgcacaccggcgtgcccagcagattttctggctctggcagcggcaccgacttcaccctgaccatatctagcctgcagcctgaggacttcgccacctactattgtcagcagggccagacatacccctacacctttggcggcggaacaaaggtggaaatcaagggaggcggaggatctggcggatctggaagtggcggcggtggatctgcttctggctctggccaggttcagctggttcagtctggcgccgaagtgaagaaacctggcgcctctgtgaaggtgtcctgcaaggccagcggctacacctttaccagctactacatccactgggtccgacaggcccctggacaaggactggaatggatcggcagcatctaccccggcaacgtgaacaccaactacaacgagaagttcaaggaccgggccacactgaccgtggacacctctatcagcaccgcctacatggaactgagccggctgagatccgatgataccgccgtgtacttctgcaccagaagccactacggcctggactggaacttcgatgtgtggggccagggcaccaccgtgacagtttcttctggaggcagctctggccaggttcagctggttcagtctggcgccgaggttgtgaaacctggcgcctctgtgaagctgagctgtaaagccagcggctacaccttcaccagctactggctgcactgggtccgacaggctccaggacaaggactggaatgggtcggaatgatcgaccccagcaacagcgacacccggttcaaccccaacttcaaggacagagtgaccatcaccgccgacaccagcacaagcaccgcctacatggaactgagcagcctgagaagcgaggacaccgccgtgtactactgcgccacctacaagagctacgtgtcccctctggattactggggccagggcacaagcgtgacagtgtcatctgcttctggcggctccggagataagacccacacatgtcctccatgtcctgctccagaactgctcggcggcccttctgtgttcctgtttcctccaaagcctaaggacaccctgatgatcagcagaacccctgaagtgacctgcgtggtggtggatgtgtctcacgaggaccccgaagtgaagttcaattggtacgtggacggcgtggaagtgcacaacgccaagaccaagcctagagaggaacagtacaacagcacctacagagtggtgtccgtgctgaccgtgctgcaccaggattggctgaacggcaaagagtacaagtgcaaggtgtccaacaaggccctgcctgctcctatcgagaaaaccatcagcaaggccaagggccagcctagggaaccccaggtttacacccttcctccatgccgggatgagctgaccaagaaccaggtgtccctgtggtgtctcgtgaagggcttctaccccagcgacattgccgtggaatgggagagcaatggccagcctgagaacaactacaagacaacccctcctgtgctggacagcgacggctcattcttcctgtacagcaagctgacagtcgacaagtccagatggcagcagggcaacgtgttcagttgcagcgtgatgcacgaggccctgcacaaccactacacccagaagtccctgagcctgtctcctgga

SEQ ID NO: 366 - protein, 716 aa, synthetic construct
  source 1..716: note = TgCD28cshrCD20L1knobLALAPA
DIQMTQSPSSLSASVGDRVTITCHASQNIYVWLNWYQQKPGKAPKLLIYKASNLHTGVPSRFSGSGSGTDFTLTISSLQPEDFATYYCQQGQTYPYTFGGGTKVEIKGGSSGEIQLTQSPSSLSASVGDRVTITCRASSSVSYIHWFQQKPGSAPKSLIYATSNLASGVPSRFSGSGSGTDYTLTISSLQPEDFATYYCQQWTSNPPTFGGGTKLEIKGGGGSGGSGSGGGGSASGSGQVQLVQPGAEVKKPGASVKMSCKASGYTFTSYNMHWVRQAPGRGLEWMGAIYPGNGDTSYNQKFQGRVTLTADKSTSTAYMELSSLESEDTAVYYCARSTYYGGDWYFNVWGAGTTVTVSAGGSSGQVQLVQSGAEVKKPGASVKVSCKASGYTFTSYYIHWVRQAPGQGLEWIGSIYPGNVNTNYNEKFKDRATLTVDTSISTAYMELSRLRSDDTAVYFCTRSHYGLDWNFDVWGQGTTVTVSSASGGSGDKTHTCPPCPAPELLGGPSVFLFPPKPKDTLMISRTPEVTCVVVDVSHEDPEVKFNWYVDGVEVHNAKTKPREEQYNSTYRVVSVLTVLHQDWLNGKEYKCKVSNKALPAPIEKTISKAKGQPREPQVYTLPPCRDELTKNQVSLWCLVKGFYPSDIAVEWESNGQPENNYKTTPPVLDSDGSFFLYSKLTVDKSRWQQGNVFSCSVMHEALHNHYTQKSLSLSPG

SEQ ID NO: 367 - DNA, 2148 bp, synthetic construct
  source 1..2148: mol_type = other DNA; note = TgCD28cshrCD20L1knobLALAPA
gacatccagatgacacagagccctagcagcctgtctgccagcgtgggagacagagtgaccatcacatgtcacgccagccagaacatctacgtgtggctgaactggtatcagcagaagcccggcaaggcccctaagctgctgatctacaaggccagcaatctgcacaccggcgtgcccagcagattttctggctctggcagcggcaccgacttcaccctgaccatatctagcctgcagcctgaggacttcgccacctactattgtcagcagggccagacatacccctacacctttggcggcggaacaaaggtggaaatcaagggcggatcttctggagagatccagctgacacagagcccttctagcctgtctgccagcgtgggcgacagagtgaccatcacatgtagagccagcagcagcgtgtcctatatccactggttccagcagaagcctggaagcgcccctaagtccctgatctatgccacaagcaacctggcctctggcgtgcccagcagattttctggcagcggctctggcaccgactacaccctgacaatcagctccctgcagcctgaggacttcgccacctactactgccagcagtggacaagcaaccctcctacatttggcggaggcaccaagctggaaatcaagggaggcggaggatctggcggatctggaagtggcggcggtggatctgcttctggctctggccaggttcagctggttcagcctggcgccgaagtgaaaaaacctggcgcctccgtgaagatgagctgcaaggccagcggctacaccttcaccagctacaacatgcactgggtccgacaggcccctggcagaggacttgaatggatgggcgccatctatcccggcaacggcgatacaagctacaaccagaaattccagggcagagtgaccctgaccgccgacaagagcacaagcaccgcctacatggaactgagcagcctggaaagcgaggacaccgccgtgtactactgtgccagaagcacctactacggcggcgactggtacttcaatgtgtggggagccggcaccaccgtgacagtttctgctggaggcagctctggccaggttcagctggttcagtctggcgccgaagtgaagaaacctggcgcctctgtgaaggtgtcctgcaaggccagcggctacacctttaccagctactacatccactgggtccgacaggcccctggacaaggactggaatggatcggcagcatctaccccggcaacgtgaacaccaactacaacgagaagttcaaggaccgggccacactgaccgtggacacctctatcagcaccgcctacatggaactgagccggctgagatccgatgataccgccgtgtacttctgcaccagaagccactacggcctggactggaacttcgatgtgtggggccagggcaccaccgtgacagtttcttctgcttctggcggctccggagataagacccacacatgtcctccatgtcctgctccagaagctgctggcggcccttctgtgttcctgtttcctccaaagcctaaggacaccctgatgatcagcagaacccctgaagtgacctgcgtggtggtggatgtgtctcacgaggaccccgaagtgaagttcaattggtacgtggacggcgtggaagtgcacaacgccaagaccaagcctagagaggaacagtacaacagcacctacagagtggtgtccgtgctgaccgtgctgcaccaggattggctgaacggcaaagagtacaagtgcaaggtgtccaacaaggccctggccgctcctatcgagaaaaccatcagcaaggccaagggccagcctagggaaccccaggtttacacccttcctccatgccgggatgagctgaccaagaaccaggtgtccctgtggtgtctcgtgaagggcttctaccccagcgacattgccgtggaatgggagagcaatggccagcctgagaacaactacaagacaacccctcctgtgctggacagcgacggctcattcttcctgtacagcaagctgacagtcgacaagtccagatggcagcagggcaacgtgttcagttgcagcgtgatgcacgaggccctgcacaaccactacacccagaagtccctgagcctgtctcctgga

SEQ ID NO: 368 - protein, 716 aa, synthetic construct; identical to SEQ ID NO: 366
  source 1..716: note = TgCD28cshrCD20L1knob

SEQ ID NO: 369 - DNA, 2148 bp, synthetic construct
  source 1..2148: mol_type = other DNA; note = TgCD28cshrCD20L1knob
gacatccagatgacacagagccctagcagcctgtctgccagcgtgggagacagagtgaccatcacatgtcacgccagccagaacatctacgtgtggctgaactggtatcagcagaagcccggcaaggcccctaagctgctgatctacaaggccagcaatctgcacaccggcgtgcccagcagattttctggctctggcagcggcaccgacttcaccctgaccatatctagcctgcagcctgaggacttcgccacctactattgtcagcagggccagacatacccctacacctttggcggcggaacaaaggtggaaatcaagggcggatcttctggagagatccagctgacacagagcccttctagcctgtctgccagcgtgggcgacagagtgaccatcacatgtagagccagcagcagcgtgtcctatatccactggttccagcagaagcctggaagcgcccctaagtccctgatctatgccacaagcaacctggcctctggcgtgcccagcagattttctggcagcggctctggcaccgactacaccctgacaatcagctccctgcagcctgaggacttcgccacctactactgccagcagtggacaagcaaccctcctacatttggcggaggcaccaagctggaaatcaagggaggcggaggatctggcggatctggaagtggcggcggtggatctgcttctggctctggccaggttcagctggttcagcctggcgccgaagtgaaaaaacctggcgcctccgtgaagatgagctgcaaggccagcggctacaccttcaccagctacaacatgcactgggtccgacaggcccctggcagaggacttgaatggatgggcgccatctatcccggcaacggcgatacaagctacaaccagaaattccagggcagagtgaccctgaccgccgacaagagcacaagcaccgcctacatggaactgagcagcctggaaagcgaggacaccgccgtgtactactgtgccagaagcacctactacggcggcgactggtacttcaatgtgtggggagccggcaccaccgtgacagtttctgctggaggcagctctggccaggttcagctggttcagtctggcgccgaagtgaagaaacctggcgcctctgtgaaggtgtcctgcaaggccagcggctacacctttaccagctactacatccactgggtccgacaggcccctggacaaggactggaatggatcggcagcatctaccccggcaacgtgaacaccaactacaacgagaagttcaaggaccgggccacactgaccgtggacacctctatcagcaccgcctacatggaactgagccggctgagatccgatgataccgccgtgtacttctgcaccagaagccactacggcctggactggaacttcgatgtgtggggccagggcaccaccgtgacagtttcttctgcttctggcggctccggagataagacccacacatgtcctccatgtcctgctccagaactgctcggcggcccttctgtgttcctgtttcctccaaagcctaaggacaccctgatgatcagcagaacccctgaagtgacctgcgtggtggtggatgtgtctcacgaggaccccgaagtgaagttcaattggtacgtggacggcgtggaagtgcacaacgccaagaccaagcctagagaggaacagtacaacagcacctacagagtggtgtccgtgctgaccgtgctgcaccaggattggctgaacggcaaagagtacaagtgcaaggtgtccaacaaggccctgcctgctcctatcgagaaaaccatcagcaaggccaagggccagcctagggaaccccaggtttacacccttcctccatgccgggatgagctgaccaagaaccaggtgtccctgtggtgtctcgtgaagggcttctaccccagcgacattgccgtggaatgggagagcaatggccagcctgagaacaactacaagacaacccctcctgtgctggacagcgacggctcattcttcctgtacagcaagctgacagtcgacaagtccagatggcagcagggcaacgtgttcagttgcagcgtgatgcacgaggccctgcacaaccactacacccagaagtccctgagcctgtctcctgga

SEQ ID NO: 370 - protein, 720 aa, synthetic construct
  source 1..720: note = ahCD28TgcsxahTrop2_317_KnobLALAPA - peptide
DIQMTQSPSSLSASVGDRVTITCHASQNIYVWLNWYQQKPGKAPKLLIYKASNLHTGVPSRFSGSGSGTDFTLTISSLQPEDFATYYCQQGQTYPYTFGGGTKVEIKGGSSGEIVLTQSPATLSLSPGERATLSCRASQSVDSYGNSFLHWYQQKPGQAPRLLIYWASNRATGIPARFSGSGSGTDFTLTISSLEPEDFAVYYCQQNNEDLWTFGGGTKLEIKGGGGSGGSGSGGGGSASGSGEVQLVESGGGLVKPGGSLRLSCAASGFTFQNYAMSWVRQAPGKGLEWVSSISSDATYTYYADSVKGRFTISRDNAKNVLYLQMTSLRAEDTAVYYCARHPPSYYYAFDYWGQGTTLTVSSGGSSGQVQLVQSGAEVKKPGASVKVSCKASGYTFTSYYIHWVRQAPGQGLEWIGSIYPGNVNTNYNEKFKDRATLTVDTSISTAYMELSRLRSDDTAVYFCTRSHYGLDWNFDVWGQGTTVTVSSASGGSGDKTHTCPPCPAPEAAGGPSVFLFPPKPKDTLMISRTPEVTCVVVDVSHEDPEVKFNWYVDGVEVHNAKTKPREEQYNSTYRVVSVLTVLHQDWLNGKEYKCKVSNKALAAPIEKTISKAKGQPREPQVYTLPPCRDELTKNQVSLWCLVKGFYPSDIAVEWESNGQPENNYKTTPPVLDSDGSFFLYSKLTVDKSRWQQGNVFSCSVMHEALHNHYTQKSLSLSPG

SEQ ID NO: 371 - DNA, 2160 bp, synthetic construct
  source 1..2160: mol_type = other DNA; note = ahCD28TgcsxahTrop2_317_KnobLALAPA - DNA
gacatccagatgacacagagccctagcagcctgtctgccagcgtgggagacagagtgaccatcacatgtcacgccagccagaacatctacgtgtggctgaactggtatcagcagaagcccggcaaggcccctaagctgctgatctacaaggccagcaatctgcacaccggcgtgcccagcagattttctggctctggcagcggcaccgacttcaccctgaccatatctagcctgcagcctgaggacttcgccacctactattgtcagcagggccagacatacccctacacctttggcggcggaacaaaggtggaaatcaagggcggatcttctggagagatcgtgctgacacagtctcccgccacactgtcactgtctccaggcgaaagagccacactgagctgtagagccagccagagcgtggacagctacggcaatagcttcctgcactggtatcagcagaagcccggacaggctcccagactgctgatctactgggccagcaatagagccacaggcatccccgccagattttctggctctggcagcggcaccgatttcaccctgaccataagcagcctggaacctgaggacttcgccgtgtactactgccagcagaacaacgaggacctgtggacctttggcggaggcaccaagctggaaatcaagggaggcggaggatctggcggatctggaagtggcggcggtggatctgcttctggctctggcgaggtgcagctggttgaatctggcggcggacttgtgaagcctggcggatctctgagactgagctgtgccgccagcggcttcacattccagaactacgccatgagctgggtccgacaggcccctggaaaaggccttgaatgggtgtccagcatcagcagcgacgccacctacacctactacgccgatagcgtgaagggcagattcaccatcagccgggacaacgccaagaacgtgctgtacctgcagatgaccagcctgagagccgaggataccgccgtgtactactgcgccagacatcctcctagctactactatgccttcgactactggggccagggcaccacactgacagtctcttctggaggcagctctggccaggttcagctggttcagtctggcgccgaagtgaagaaacctggcgcctctgtgaaggtgtcctgcaaggccagcggctacacctttaccagctactacatccactgggtccgacaggcccctggacaaggactggaatggatcggcagcatctaccccggcaacgtgaacaccaactacaacgagaagttcaaggaccgggccacactgaccgtggacacctctatcagcaccgcctacatggaactgagccggctgagatccgatgataccgccgtgtacttctgcaccagaagccactacggcctggactggaacttcgatgtgtggggccagggcaccaccgtgacagtttcttctgcttctggcggctccggagataagacccacacatgtcctccatgtcctgctccagaagctgctggcggcccttctgtgttcctgtttcctccaaagcctaaggacaccctgatgatcagcagaacccctgaagtgacctgcgtggtggtggatgtgtctcacgaggaccccgaagtgaagttcaattggtacgtggacggcgtggaagtgcacaacgccaagaccaagcctagagaggaacagtacaacagcacctacagagtggtgtccgtgctgaccgtgctgcaccaggattggctgaacggcaaagagtacaagtgcaaggtgtccaacaaggccctggccgctcctatcgagaaaaccatcagcaaggccaagggccagcctagggaaccccaggtttacacccttcctccatgccgggatgagctgaccaagaaccaggtgtccctgtggtgtctcgtgaagggcttctaccccagcgacattgccgtggaatgggagagcaatggccagcctgagaacaactacaagacaacccctcctgtgctggacagcgacggctcattcttcctgtacagcaagctgacagtcgacaagtccagatggcagcagggcaacgtgttcagttgcagcgtgatgcacgaggccctgcacaaccactacacccagaagtccctgagcctgtctcctgga

SEQ ID NO: 372 - protein, 721 aa, synthetic construct
  source 1..721: note = ahCD28TgcsxahcMet_KnobLALAPA peptide
DIQMTQSPSSLSASVGDRVTITCHASQNIYVWLNWYQQKPGKAPKLLIYKASNLHTGVPSRFSGSGSGTDFTLTISSLQPEDFATYYCQQGQTYPYTFGGGTKVEIKGGSSGDIVMTQSPDSLAVSLGERATINCKSSQSLLYTSSQKNYLAWYQQKPGQPPKLLIYWASTRESGVPDRFSGSGSGTDFTLTISSLQAEDVAVYYCQQYYAYPWTFGGGTKLEIKGGGGSGGSGSGGGGSASGSGQVQLVQSGAEVVKPGASVKLSCKASGYTFTSYWLHWVRQAPGQGLEWVGMIDPSNSDTRFNPNFKDRVTITADTSTSTAYMELSSLRSEDTAVYYCATYKSYVSPLDYWGQGTSVTVSSGGSSGQVQLVQSGAEVKKPGASVKVSCKASGYTFTSYYIHWVRQAPGQGLEWIGSIYPGNVNTNYNEKFKDRATLTVDTSISTAYMELSRLRSDDTAVYFCTRSHYGLDWNFDVWGQGTTVTVSSASGGSGDKTHTCPPCPAPEAAGGPSVFLFPPKPKDTLMISRTPEVTCVVVDVSHEDPEVKFNWYVDGVEVHNAKTKPREEQYNSTYRVVSVLTVLHQDWLNGKEYKCKVSNKALAAPIEKTISKAKGQPREPQVYTLPPCRDELTKNQVSLWCLVKGFYPSDIAVEWESNGQPENNYKTTPPVLDSDGSFFLYSKLTVDKSRWQQGNVFSCSVMHEALHNHYTQKSLSLSPG

SEQ ID NO: 373 - DNA, 2163 bp, synthetic construct
  source 1..2163: mol_type = other DNA; note = ahCD28TgcsxahcMet_KnobLALAPA - DNA
gacatccagatgacacagagccctagcagcctgtctgccagcgtgggagacagagtgaccatcacatgtcacgccagccagaacatctacgtgtggctgaactggtatcagcagaagcccggcaaggcccctaagctgctgatctacaaggccagcaatctgcacaccggcgtgcccagcagattttctggctctggcagcggcaccgacttcaccctgaccatatctagcctgcagcctgaggacttcgccacctactattgtcagcagggccagacatacccctacacctttggcggcggaacaaaggtggaaatcaagggcggatcttctggagacatcgtgatgacacagagccctgatagcctggccgtgtctctgggagagagagccaccatcaactgcaagagcagccagagcctgctgtacacctccagccagaagaactacctggcctggtatcagcagaagcccggccagcctcctaagctgctgatctactgggccagcaccagagaaagcggcgtgcccgatagattttctggctctggcagcggcaccgacttcaccctgacaatttctagcctgcaagccgaggacgtggccgtgtactactgccagcagtactacgcttacccctggacctttggcggaggcaccaagctggaaatcaagggaggcggaggatctggcggatctggaagtggcggcggtggatctgcttctggctctggccaggttcagctggttcagtctggcgccgaggttgtgaaacctggcgcctctgtgaagctgagctgtaaagccagcggctacaccttcaccagctactggctgcactgggtccgacaggctccaggacaaggactggaatgggtcggaatgatcgaccccagcaacagcgacacccggttcaaccccaacttcaaggacagagtgaccatcaccgccgacaccagcacaagcaccgcctacatggaactgagcagcctgagaagcgaggacaccgccgtgtactactgcgccacctacaagagctacgtgtcccctctggattactggggccagggcacaagcgtgacagtgtcatctggaggcagctctggccaggttcagctggttcagtctggcgccgaagtgaagaaacctggcgcctctgtgaaggtgtcctgcaaggccagcggctacacctttaccagctactacatccactgggtccgacaggcccctggacaaggactggaatggatcggcagcatctaccccggcaacgtgaacaccaactacaacgagaagttcaaggaccgggccacactgaccgtggacacctctatcagcaccgcctacatggaactgagccggctgagatccgatgataccgccgtgtacttctgcaccagaagccactacggcctggactggaacttcgatgtgtggggccagggcaccaccgtgacagtttcttctgcttctggcggctccggagataagacccacacatgtcctccatgtcctgctccagaagctgctggcggcccttctgtgttcctgtttcctccaaagcctaaggacaccctgatgatcagcagaacccctgaagtgacctgcgtggtggtggatgtgtctcacgaggaccccgaagtgaagttcaattggtacgtggacggcgtggaagtgcacaacgccaagaccaagcctagagaggaacagtacaacagcacctacagagtggtgtccgtgctgaccgtgctgcaccaggattggctgaacggcaaagagtacaagtgcaaggtgtccaacaaggccctggccgctcctatcgagaaaaccatcagcaaggccaagggccagcctagggaaccccaggtttacacccttcctccatgccgggatgagctgaccaagaaccaggtgtccctgtggtgtctcgtgaagggcttctaccccagcgacattgccgtggaatgggagagcaatggccagcctgagaacaactacaagacaacccctcctgtgctggacagcgacggctcattcttcctgtacagcaagctgacagtcgacaagtccagatggcagcagggcaacgtgttcagttgcagcgtgatgcacgaggccctgcacaaccactacacccagaagtccctgagcctgtctcctgga

SEQ ID NO: 374 - protein, 327 aa, synthetic construct
  source 1..327: note = ahCD28Tgcsc18ahCD3OKT3L hk peptide
DIQMTQSPSSLSASVGDRVTITCHASQNIYVWLNWYQQKPGKAPKLLIYKASNLHTGVPSRFSGSGSGTDFTLTISSLQPEDFATYYCQQGQTYPYTFGGGTKVEIKASTRKAGDIQLTQSPSSLSASVGDRVTITCRASQSISYLNWYQQKPGKSPKRWIYDTSKLASGVPSRFSGSGSGTDYTLTISSMQPEDAATYYCQQWSSNPLTFGGGTKVEIKRTVAAPSVFIFPPSDEQLKSGTASVVCLLNNFYPREAKVQWKVDNALQSGNSQESVTEQDSKDSTYSLSSTLTLSKADYEKHKVYACEVTHQGLSSPVTKSFNRGEC

SEQ ID NO: 375 - DNA, 981 bp, synthetic construct
  source 1..981: mol_type = other DNA; note = ahCD28Tgcsc18ahCD3OKT3L hk - DNA
gacatccagatgacacagagccctagcagcctgtctgccagcgtgggagacagagtgaccatcacatgtcacgccagccagaacatctacgtgtggctgaactggtatcagcagaagcccggcaaggcccctaagctgctgatctacaaggccagcaatctgcacaccggcgtgcccagcagattttctggctctggcagcggcaccgacttcaccctgaccatatctagcctgcagcctgaggacttcgccacctactattgtcagcagggccagacatacccctacacctttggcggcggaacaaaggtggaaatcaaggctagcacacggaaggctggcgacatccagctgacacagagcccttctagcctgtctgccagcgtgggcgacagagtgaccatcacatgtagagccagccagagcatcagctacctgaactggtatcagcagaagcccggcaagagccccaagcggtggatctacgatacaagcaagctggcctctggcgtgcccagcagattttctggctctggcagcggcaccgactacaccctgacaatcagcagcatgcagcctgaggatgccgccacctactactgccagcagtggtccagcaatcccctgacatttggcggaggcaccaaggtggaaatcaagcgtacggtggccgctcccagcgtgttcatcttcccacctagcgacgagcagctgaagtccggcacagcctctgtcgtgtgcctgctgaacaacttctacccccgcgaggccaaagtgcagtggaaggtggacaacgccctgcagagcggcaacagccaggaaagcgtgaccgagcaggacagcaaggactccacctacagcctgagcagcaccctgacactgagcaaggccgactacgagaagcacaaggtgtacgcctgcgaagtgacccaccagggcctgtctagccccgtgaccaagagcttcaaccggggcgagtgt

SEQ ID NO: 376 - protein, 575 aa, synthetic construct
  source 1..575: note = ahCD28Tgcsc18ahCD3OKT3HholeLALAPA (heavy) peptide
QVQLVQSGAEVKKPGASVKVSCKASGYTFTSYYIHWVRQAPGQGLEWIGSIYPGNVNTNYNEKFKDRATLTVDTSISTAYMELSRLRSDDTAVYFCTRSHYGLDWNFDVWGQGTTVTVSSASTRKAGQVQLVQSGAEVAKPGASVKVSCKASGYTFTRYTMHWVKQAPGQGLEWIGYINPSRGYTNYAQKFQGKATLTTDKSTSTAYMELSSLRSEDTAVYYCARYYDDHYSLDYWGQGTTLTVSSASTKGPSVFPLAPSSKSTSGGTAALGCLVKDYFPEPVTVSWNSGALTSGVHTFPAVLQSSGLYSLSSVVTVPSSSLGTQTYICNVNHKPSNTKVDKKVEPKSCDKTHTCPPCPAPEAAGGPSVFLFPPKPKDTLMISRTPEVTCVVVDVSHEDPEVKFNWYVDGVEVHNAKTKPREEQYNSTYRVVSVLTVLHQDWLNGKEYKCKVSNKALAAPIEKTISKAKGQPREPQVCTLPPSRDELTKNQVSLSCAVKGFYPSDIAVEWESNGQPENNYKTTPPVLDSDGSFFLVSKLTVDKSRWQQGNVFSCSVMHEALHNHYTQKSLSLSPG

SEQ ID NO: 377 - DNA, 1725 bp, synthetic construct
  source 1..1725: mol_type = other DNA; note = ahCD28Tgcsc18ahCD3OKT3HholeLALAPA (heavy) - DNA
caggttcagctggttcagtctggcgccgaagtgaagaaacctggcgcctctgtgaaggtgtcctgcaaggccagcggctacacctttaccagctactacatccactgggtccgacaggcccctggacaaggactggaatggatcggcagcatctaccccggcaacgtgaacaccaactacaacgagaagttcaaggaccgggccacactgaccgtggacacctctatcagcaccgcctacatggaactgagccggctgagatccgatgataccgccgtgtacttctgcaccagaagccactacggcctggactggaacttcgatgtgtggggccagggcaccaccgtgacagtttcttctgctagcacacggaaggctggccaggttcagctggttcagtctggcgccgaagtggctaaacctggcgcctccgtgaaggtgtcctgtaaagccagcggctacacattcacccggtacaccatgcactgggtcaagcaggctccaggacagggactcgagtggatcggctacatcaaccccagcagaggctacaccaactacgcccagaagttccagggcaaagccacactgaccaccgacaagagcaccagcaccgcctacatggaactgagcagcctgagaagcgaggacaccgccgtgtactactgtgcccggtactacgacgaccactacagcctggattattggggccagggcacaaccctgaccgtgtcatctgcttcgaccaagggcccatccgtgtttcctctggctcccagcagcaagtctacaagcggaggaacagccgctctgggctgcctggtcaaggattactttcccgagcctgtgaccgtgtcctggaattctggcgctctgacaagcggcgtgcacacctttccagctgtgctgcaaagcagcggcctgtactctctgagcagcgtggtcacagtgcctagctctagcctgggcacccagacctacatctgcaatgtgaaccacaagcctagcaacaccaaggtggacaagaaggtggaacccaagagctgcgataagacccacacatgtcctccatgtcctgctccagaggctgctggtggcccttccgtgtttctgttccctccaaagcctaaggacaccctgatgatcagcaggacccctgaagtgacctgcgtggtggtggatgtgtctcacgaggacccagaagtgaagttcaattggtacgtggacggcgtggaagtgcacaacgccaagaccaagcctagagaggaacagtacaacagcacctacagagtggtgtccgtgctgaccgtgctgcaccaggattggctgaacggcaaagagtacaagtgcaaggtgtccaacaaggccctggccgctcctatcgagaaaaccatcagcaaggccaagggccagcctcgcgaacctcaagtctgtacactgcctcctagccgggacgagctgaccaagaatcaggtgtcactgagctgcgccgtgaagggcttttaccccagcgacattgccgtggaatgggagagcaatggccagccagagaacaactacaagacaacccctcctgtgctggacagcgacggctcatttttcctggtgtccaagctgacagtggacaagagcagatggcagcagggcaacgtgttcagctgcagcgtgatgcacgaggccctgcacaaccactacacccagaaaagcctgtctctgagccctggc

SEQ ID NO: 378 - protein, 327 aa, synthetic construct
  source 1..327: note = ahCD28TgcsCl9ahCD3OKT3L hk peptide
DIQMTQSPSSLSASVGDRVTITCHASQNIYVWLNWYQQKPGKAPKLLIYKASNLHTGVPSRFSGSGSGTDFTLTISSLQPEDFATYYCQQGQTYPYTFGGGTKVEIKSTRKAGGDIQLTQSPSSLSASVGDRVTITCRASQSISYLNWYQQKPGKSPKRWIYDTSKLASGVPSRFSGSGSGTDYTLTISSMQPEDAATYYCQQWSSNPLTFGGGTKVEIKRTVAAPSVFIFPPSDEQLKSGTASVVCLLNNFYPREAKVQWKVDNALQSGNSQESVTEQDSKDSTYSLSSTLTLSKADYEKHKVYACEVTHQGLSSPVTKSFNRGEC

SEQ ID NO: 379 - DNA, 981 bp, synthetic construct
  source 1..981: mol_type = other DNA; note = ahCD28TgcsCl9ahCD3OKT3L hk - DNA
gacatccagatgacacagagccctagcagcctgtctgccagcgtgggagacagagtgaccatcacatgtcacgccagccagaacatctacgtgtggctgaactggtatcagcagaagcccggcaaggcccctaagctgctgatctacaaggccagcaatctgcacaccggcgtgcccagcagattttctggctctggcagcggcaccgacttcaccctgaccatatctagcctgcagcctgaggacttcgccacctactattgtcagcagggccagacatacccctacacctttggcggcggaacaaaggtggaaatcaagagcacgcgtaaggctggcggagacatccagctgacacagagcccttctagcctgtctgccagcgtgggcgacagagtgaccatcacatgtagagccagccagagcatcagctacctgaactggtatcagcagaagcccggcaagagccccaagcggtggatctacgatacaagcaagctggcctctggcgtgcccagcagattttctggctctggcagcggcaccgactacaccctgacaatcagcagcatgcagcctgaggatgccgccacctactactgccagcagtggtccagcaatcccctgacatttggcggaggcaccaaggtggaaatcaagcgtacggtggccgctcccagcgtgttcatcttcccacctagcgacgagcagctgaagtccggcacagcctctgtcgtgtgcctgctgaacaacttctacccccgcgaggccaaagtgcagtggaaggtggacaacgccctgcagagcggcaacagccaggaaagcgtgaccgagcaggacagcaaggactccacctacagcctgagcagcaccctgacactgagcaaggccgactacgagaagcacaaggtgtacgcctgcgaagtgacccaccagggcctgtctagccccgtgaccaagagcttcaaccggggcgagtgt

SEQ ID NO: 380 - protein, 575 aa, synthetic construct
  source 1..575: note = ahCD28TgcCl9ahCD3OKT3HholeLALAPA (heavy) peptide
QVQLVQSGAEVKKPGASVKVSCKASGYTFTSYYIHWVRQAPGQGLEWIGSIYPGNVNTNYNEKFKDRATLTVDTSISTAYMELSRLRSDDTAVYFCTRSHYGLDWNFDVWGQGTTVTVSSSTRKAGGQVQLVQSGAEVAKPGASVKVSCKASGYTFTRYTMHWVKQAPGQGLEWIGYINPSRGYTNYAQKFQGKATLTTDKSTSTAYMELSSLRSEDTAVYYCARYYDDHYSLDYWGQGTTLTVSSASTKGPSVFPLAPSSKSTSGGTAALGCLVKDYFPEPVTVSWNSGALTSGVHTFPAVLQSSGLYSLSSVVTVPSSSLGTQTYICNVNHKPSNTKVDKKVEPKSCDKTHTCPPCPAPEAAGGPSVFLFPPKPKDTLMISRTPEVTCVVVDVSHEDPEVKFNWYVDGVEVHNAKTKPREEQYNSTYRVVSVLTVLHQDWLNGKEYKCKVSNKALAAPIEKTISKAKGQPREPQVCTLPPSRDELTKNQVSLSCAVKGFYPSDIAVEWESNGQPENNYKTTPPVLDSDGSFFLVSKLTVDKSRWQQGNVFSCSVMHEALHNHYTQKSLSLSPG

SEQ ID NO: 381 - DNA, 1725 bp, synthetic construct
  source 1..1725: mol_type = other DNA; note = ahCD28TgcCl9ahCD3OKT3HholeLALAPA (heavy) - DNA
caggttcagctggttcagtctggcgccgaagtgaagaaacctggcgcctctgtgaaggtgtcctgcaaggccagcggctacacctttaccagctactacatccactgggtccgacaggcccctggacaaggactggaatggatcggcagcatctaccccggcaacgtgaacaccaactacaacgagaagttcaaggaccgggccacactgaccgtggacacctctatcagcaccgcctacatggaactgagccggctgagatccgatgataccgccgtgtacttctgcaccagaagccactacggcctggactggaacttcgatgtgtggggccagggcaccaccgtgacagtttcttctagcacgcgtaaggctggcggacaggttcagctggttcagtctggcgccgaagtggctaaacctggcgcctccgtgaaggtgtcctgtaaagccagcggctacacattcacccggtacaccatgcactgggtcaagcaggctccaggacagggactcgagtggatcggctacatcaaccccagcagaggctacaccaactacgcccagaagttccagggcaaagccacactgaccaccgacaagagcaccagcaccgcctacatggaactgagcagcctgagaagcgaggacaccgccgtgtactactgtgcccggtactacgacgaccactacagcctggattattggggccagggcacaaccctgaccgtgtcatctgcttcgaccaagggcccatccgtgtttcctctggctcccagcagcaagtctacaagcggaggaacagccgctctgggctgcctggtcaaggattactttcccgagcctgtgaccgtgtcctggaattctggcgctctgacaagcggcgtgcacacctttccagctgtgctgcaaagcagcggcctgtactctctgagcagcgtggtcacagtgcctagctctagcctgggcacccagacctacatctgcaatgtgaaccacaagcctagcaacaccaaggtggacaagaaggtggaacccaagagctgcgataagacccacacatgtcctccatgtcctgctccagaggctgctggtggcccttccgtgtttctgttccctccaaagcctaaggacaccctgatgatcagcaggacccctgaagtgacctgcgtggtggtggatgtgtctcacgaggacccagaagtgaagttcaattggtacgtggacggcgtggaagtgcacaacgccaagaccaagcctagagaggaacagtacaacagcacctacagagtggtgtccgtgctgaccgtgctgcaccaggattggctgaacggcaaagagtacaagtgcaaggtgtccaacaaggccctggccgctcctatcgagaaaaccatcagcaaggccaagggccagcctcgcgaacctcaagtctgtacactgcctcctagccgggacgagctgaccaagaatcaggtgtcactgagctgcgccgtgaagggcttttaccccagcgacattgccgtggaatgggagagcaatggccagccagagaacaactacaagacaacccctcctgtgctggacagcgacggctcatttttcctggtgtccaagctgacagtggacaagagcagatggcagcagggcaacgtgttcagctgcagcgtgatgcacgaggccctgcacaaccactacacccagaaaagcctgtctctgagccctggc

SEQ ID NO: 382 - protein, 713 aa, synthetic construct
  source 1..713: note = Trop2_20xHer2_knobLALAPA peptide
DIQMTQSPSSLSASVGDRVTITCQASQDINKYLAWYQKKPGKAPKLLIHYTSNLQTGVPSRFSGSGSGTDFTFTISSLQPEDIATYYCLQYDDLFTFGQGTKLEIKGGSSGDIQMTQSPSSLSASVGDRVTITCRASQDVNTAVAWYQQKPGKAPKLLIYSASFLYSGVPSRFSGSRSGTDFTLTISSLQPEDFATYYCQQHYTTPPTFGQGTKVEIKGGGGSGGSGSGGGGSASGSGEVQLVESGGGLVQPGGSLRLSCAASGFNIKDTYIHWVRQAPGKGLEWVARIYPTNGYTRYADSVKGRFTISADTSKNTAYLQMNSLRAEDTAVYYCSRWGGDGFYAMDYWGQGTLVTVSSGGSSGQVQLVQSGAEVKKPGASVKVSCKASGSSFTGYTMNWVKQAPGQGLEWIGIINPYQGDTTYNQKFQGKVTITVDKSTSTVYMELSSLRSEDTAVYYCARGAGLYYFDYWGQGTTVTVSSASGGSGDKTHTCPPCPAPEAAGGPSVFLFPPKPKDTLMISRTPEVTCVVVDVSHEDPEVKFNWYVDGVEVHNAKTKPREEQYNSTYRVVSVLTVLHQDWLNGKEYKCKVSNKALAAPIEKTISKAKGQPREPQVYTLPPCRDELTKNQVSLWCLVKGFYPSDIAVEWESNGQPENNYKTTPPVLDSDGSFFLYSKLTVDKSRWQQGNVFSCSVMHEALHNHYTQKSLSLSPG

SEQ ID NO: 383 - DNA, 2139 bp, synthetic construct
  source 1..2139: mol_type = other DNA; note = Trop2_20xHer2_knobLALAPA - DNA
gacatccagatgacacagagccctagcagcctgtctgccagcgtgggagacagagtgaccattacctgtcaggccagccaggacatcaacaagtacctggcctggtatcagaagaagcccggcaaggctcctaagctgctgatccactacaccagcaacctgcagacaggcgtgcccagcagattttctggcagcggctctggcaccgacttcaccttcaccataagcagcctgcagcctgaggatatcgccacctactactgcctgcagtacgacgacctgttcacctttggccagggcaccaagctggaaatcaaaggcggatcttctggagacatccagatgacacagagccctagcagcctgtctgccagcgtgggagacagagtgaccatcacctgtagagccagccaggacgtgaacacagccgtggcttggtatcagcagaagcctggcaaggcccctaagctgctgatctacagcgccagctttctgtacagcggcgtgcccagcagattcagcggaagcagaagcggcaccgacttcaccctgaccataagcagtctgcagcccgaggacttcgccacctactactgtcagcagcactacaccacacctccaacctttggccagggcaccaaggtggaaatcaagggaggcggaggatctggcggatctggaagtggcggcggtggatctgcttctggctctggcgaggtgcagctggttgaatctggcggaggactggttcagcctggcggatctctgagactgtcttgtgccgccagcggcttcaacatcaaggacacctacatccactgggtccgacaggcccctggcaaaggacttgaatgggtcgccagaatctaccccaccaacggctacaccagatacgccgactctgtgaagggcagattcaccatcagcgccgacaccagcaagaacaccgcctacctgcagatgaacagcctgagagccgaggacaccgccgtgtactactgtagtagatggggaggcgacggcttctacgccatggattattggggccagggcaccctggtcaccgtttcttctggaggcagctctggccaggtgcagctggtgcagtctggcgccgaagttaagaaacctggcgcctccgtgaaggtgtcctgtaaagccagcggcagcagcttcaccggctacaccatgaactgggtcaagcaggctcctggacagggactcgagtggatcggcatcatcaacccctaccagggcgacaccacctacaaccagaagttccagggcaaagtcaccatcaccgtggacaagagcaccagcaccgtgtacatggaactgtccagcctgagaagcgaggacaccgccgtgtactactgtgctagaggcgccggactgtactacttcgactattggggccagggaaccaccgtgaccgttagctctgctagtggcggctccggagataagacccacacatgtcctccatgtcctgctccagaagctgccggcggaccttccgtgtttctgttccctccaaagcctaaggacaccctgatgatcagcaggacccctgaagtgacctgcgtggtggtggatgtgtctcacgaggacccagaagtgaagttcaattggtacgtggacggcgtggaagtgcacaacgccaagaccaagcctagagaggaacagtacaacagcacctacagagtggtgtccgtgctgacagtgctgcaccaggattggctgaacggcaaagagtacaagtgcaaggtgtccaacaaggccctggctgcccctatcgagaaaaccatcagcaaggccaagggccagcctagggaaccccaggtttacacccttcctccatgccgggatgagctgaccaagaaccaggtgtccctgtggtgtctggtcaagggcttctaccccagcgacattgccgtggaatgggagagcaatggccagcctgagaacaactacaagaccacacctcctgtgctggactccgacggatcattcttcctgtacagcaagctgactgtggacaagagcagatggcagcagggcaacgtgttcagctgcagcgtgatgcacgaggccctgcacaaccactacacacagaagtccctgtctctgagccctggc

SEQ ID NO: 384 - protein, 106 aa, synthetic construct; identical to SEQ ID NO: 95
  source 1..106: note = Trop2 VL

SEQ ID NO: 385 - protein, 6 aa, synthetic construct
  source 1..6: note = Trop2 LCDR1
QDINKY

SEQ ID NO: 386 - skipped

SEQ ID NO: 387 - protein, 8 aa, synthetic construct
  source 1..8: note = Trop2 LCDR3
LQYDDLFT

SEQ ID NO: 388 - protein, 118 aa, synthetic construct; identical to SEQ ID NO: 94
  source 1..118: note = Trop2 VH

SEQ ID NO: 389 - protein, 8 aa, synthetic construct
  source 1..8: note = Trop2 HCDR1
GSSFTGYT

SEQ ID NO: 390 - protein, 7 aa, synthetic construct
  source 1..7: note = Trop2 HCDR2
NPYQGDT

SEQ ID NO: 391 - protein, 11 aa, synthetic construct
  source 1..11: note = Trop2 HCDR3
ARGAGLYYFDY

SEQ ID NO: 392 - protein, 107 aa, synthetic construct [sequence omitted]

SEQ ID NO: 393 - protein, 11 aa, synthetic construct
  source 1..11: note = Her2 LCDR1
RASQDVNTAVA

SEQ ID NO: 394 - protein, 7 aa, synthetic construct
  source 1..7: note = Her2 LCDR2
SASFLYS

SEQ ID NO: 395 - protein, 9 aa, synthetic construct
  source 1..9: note = Her2 LCDR3
QQHYTTPPT

SEQ ID NO: 396 - protein, 120 aa, synthetic construct [sequence omitted]

SEQ ID NO: 397 - protein, 5 aa, synthetic construct
  source 1..5: note = Her2 HCDR1
DTYIH

SEQ ID NO: 398 - protein, 17 aa, synthetic construct
  source 1..17: note = Her2 HCDR2
RIYPTNGYTRYADSVKG

SEQ ID NO: 399 - protein, 11 aa, synthetic construct
  source 1..11: note = Her2 HCDR3
WGGDGFYAMDY

SEQ ID NO: 400 - protein, 713 aa, synthetic construct
  source 1..713: note = Her2xTrop2_20_knobLALAPA peptide
DIQMTQSPSSLSASVGDRVTITCRASQDVNTAVAWYQQKPGKAPKLLIYSASFLYSGVPSRFSGSRSGTDFTLTISSLQPEDFATYYCQQHYTTPPTFGQGTKVEIKGGSSGDIQMTQSPSSLSASVGDRVTITCQASQDINKYLAWYQKKPGKAPKLLIHYTSNLQTGVPSRFSGSGSGTDFTFTISSLQPEDIATYYCLQYDDLFTFGQGTKLEIKGGGGSGGSGSGGGGSASGSGQVQLVQSGAEVKKPGASVKVSCKASGSSFTGYTMNWVKQAPGQGLEWIGIINPYQGDTTYNQKFQGKVTITVDKSTSTVYMELSSLRSEDTAVYYCARGAGLYYFDYWGQGTTVTVSSGGSSGEVQLVESGGGLVQPGGSLRLSCAASGFNIKDTYIHWVRQAPGKGLEWVARIYPTNGYTRYADSVKGRFTISADTSKNTAYLQMNSLRAEDTAVYYCSRWGGDGFYAMDYWGQGTLVTVSSASGGSGDKTHTCPPCPAPEAAGGPSVFLFPPKPKDTLMISRTPEVTCVVVDVSHEDPEVKFNWYVDGVEVHNAKTKPREEQYNSTYRVVSVLTVLHQDWLNGKEYKCKVSNKALAAPIEKTISKAKGQPREPQVYTLPPCRDELTKNQVSLWCLVKGFYPSDIAVEWESNGQPENNYKTTPPVLDSDGSFFLYSKLTVDKSRWQQGNVFSCSVMHEALHNHYTQKSLSLSPG

SEQ ID NO: 401 - DNA, 2139 bp, synthetic construct
  source 1..2139: mol_type = other DNA; note = Her2xTrop2_20_knobLALAPA DNA
gacatccagatgacacagagccctagcagcctgtctgccagcgtgggagacagagtgaccatcacctgtagagccagccaggacgtgaacacagccgtggcttggtatcagcagaagcctggcaaggcccctaagctgctgatctacagcgccagctttctgtacagcggcgtgcccagcagattcagcggaagcagaagcggcaccgacttcaccctgaccataagcagtctgcagcccgaggacttcgccacctactactgtcagcagcactacaccacacctccaacctttggccagggcaccaaggtggaaatcaagggcggatcttctggagacatccagatgacacagagccctagcagcctgtctgccagcgtgggagacagagtgaccattacctgtcaggccagccaggacatcaacaagtacctggcctggtatcagaagaagcccggcaaggctcctaagctgctgatccactacaccagcaacctgcagacaggcgtgcccagcagattttctggcagcggctctggcaccgacttcaccttcaccataagcagcctgcagcctgaggatatcgccacctactactgcctgcagtacgacgacctgttcacctttggccagggcaccaagctggaaatcaaaggaggcggaggatctggcggatctggaagtggcggcggtggatctgcttctggctctggccaggtgcagctggtgcagtctggcgccgaagttaagaaacctggcgcctccgtgaaggtgtcctgtaaagccagcggcagcagcttcaccggctacaccatgaactgggtcaagcaggctcctggacagggactcgagtggatcggcatcatcaacccctaccagggcgacaccacctacaaccagaagttccagggcaaagtcaccatcaccgtggacaagagcaccagcaccgtgtacatggaactgtccagcctgagaagcgaggacaccgccgtgtactactgtgctagaggcgccggactgtactacttcgactattggggccagggaaccaccgtgaccgttagctctggaggcagctctggcgaggtgcagctggttgaatctggcggaggactggttcagcctggcggatctctgagactgtcttgtgccgccagcggcttcaacatcaaggacacctacatccactgggtccgacaggcccctggcaaaggacttgaatgggtcgccagaatctaccccaccaacggctacaccagatacgccgactctgtgaagggcagattcaccatcagcgccgacaccagcaagaacaccgcctacctgcagatgaacagcctgagagccgaggacaccgccgtgtactactgtagtagatggggaggcgacggcttctacgccatggattattggggccagggcaccctggtcaccgtttcttctgctagtggcggctccggagataagacccacacatgtcctccatgtcctgctccagaagctgccggcggaccttccgtgtttctgttccctccaaagcctaaggacaccctgatgatcagcaggacccctgaagtgacctgcgtggtggtggatgtgtctcacgaggacccagaagtgaagttcaattggtacgtggacggcgtggaagtgcacaacgccaagaccaagcctagagaggaacagtacaacagcacctacagagtggtgtccgtgctgacagtgctgcaccaggattggctgaacggcaaagagtacaagtgcaaggtgtccaacaaggccctggctgcccctatcgagaaaaccatcagcaaggccaagggccagcctagggaaccccaggtttacacccttcctccatgccgggatgagctgaccaagaaccaggtgtccctgtggtgtctggtcaagggcttctaccccagcgacattgccgtggaatgggagagcaatggccagcctgagaacaactacaagaccacacctcctgtgctggactccgacggatcattcttcctgtacagcaagctgactgtggacaagagcagatggcagcagggcaacgtgttcagctgcagcgtgatgcacgaggccctgcacaaccactacacacagaagtccctgtctctgagccctggc

SEQ ID NO: 402 - protein, 107 aa, synthetic construct [sequence omitted]

SEQ ID NO: 403 - protein, 120 aa, synthetic construct [sequence omitted]

SEQ ID NO: 404 - protein, 106 aa, synthetic construct; identical to SEQ ID NO: 95
  source 1..106: note = Trop2 - VL

SEQ ID NO: 405 - protein, 6 aa, synthetic construct
  source 1..6: note = Trop2 LCDR1
QDINKY

SEQ ID NO: 406 - skipped

SEQ ID NO: 407 - protein, 8 aa, synthetic construct
  source 1..8: note = Trop2 LCDR3
LQYDDLFT

SEQ ID NO: 408 - protein, 118 aa, synthetic construct; identical to SEQ ID NO: 94
  source 1..118: note = Trop2 VH

SEQ ID NO: 409 - protein, 8 aa, synthetic construct
  source 1..8: note = Trop2 HCDR1
GSSFTGYT

SEQ ID NO: 410 - protein, 7 aa, synthetic construct
  source 1..7: note = Trop2 HCDR2
NPYQGDT

SEQ ID NO: 411 - protein, 11 aa, synthetic construct
  source 1..11: note = Trop2 HCDR3
ARGAGLYYFDY

SEQ ID NO: 412 - protein, 711 aa, synthetic construct
  source 1..711: note = Trop2_20xahCD3_holeLALAPA
DIQMTQSPSSLSASVGDRVTITCQASQDINKYLAWYQKKPGKAPKLLIHYTSNLQTGVPSRFSGSGSGTDFTFTISSLQPEDIATYYCLQYDDLFTFGQGTKLEIKGGSSGDIQLTQSPSSLSASVGDRVTITCRASQSISYLNWYQQKPGKSPKRWIYDTSKLASGVPSRFSGSGSGTDYTLTISSMQPEDAATYYCQQWSSNPLTFGGGTKVEIKGGGGSGGSGSGGGGSASGSGQVQLVQSGAEVAKPGASVKVSCKASGYTFTRYTMHWVKQAPGQGLEWIGYINPSRGYTNYAQKFQGKATLTTDKSTSTAYMELSSLRSEDTAVYYCARYYDDHYSLDYWGQGTTLTVSSGGSSGQVQLVQSGAEVKKPGASVKVSCKASGSSFTGYTMNWVKQAPGQGLEWIGIINPYQGDTTYNQKFQGKVTITVDKSTSTVYMELSSLRSEDTAVYYCARGAGLYYFDYWGQGTTVTVSSASGGSGDKTHTCPPCPAPEAAGGPSVFLFPPKPKDTLMISRTPEVTCVVVDVSHEDPEVKFNWYVDGVEVHNAKTKPREEQYNSTYRVVSVLTVLHQDWLNGKEYKCKVSNKALAAPIEKTISKAKGQPREPQVCTLPPSRDELTKNQVSLSCAVKGFYPSDIAVEWESNGQPENNYKTTPPVLDSDGSFFLVSKLTVDKSRWQQGNVFSCSVMHEALHNHYTQKSLSLSPG

SEQ ID NO: 413 - DNA, 2133 bp, synthetic construct
  source 1..2133: mol_type = other DNA; note = Trop2_20xahCD3_holeLALAPA
gacatccagatgacacagagccctagcagcctgtctgccagcgtgggagacagagtgaccattacctgtcaggccagccaggacatcaacaagtacctggcctggtatcagaagaagcccggcaaggctcctaagctgctgatccactacaccagcaacctgcagacaggcgtgcccagcagattttctggcagcggctctggcaccgacttcaccttcaccataagcagcctgcagcctgaggatatcgccacctactactgcctgcagtacgacgacctgttcacctttggccagggcaccaagctggaaatcaaaggcggatcttctggagacatccagctgacacagagcccttctagcctgtctgccagcgtgggcgacagagtgaccatcacatgtagagccagccagagcatcagctacctgaactggtatcagcagaagcccggcaagagccccaagcggtggatctacgatacaagcaagctggcctctggcgtgcccagcagattttctggctctggcagcggcaccgactacaccctgacaatcagcagcatgcagcctgaggatgccgccacctactactgccagcagtggtccagcaatcccctgacatttggcggaggcaccaaggtggaaatcaagggaggcggaggatctggcggatctggaagtggcggcggtggatctgcttctggctctggccaggttcagctggttcagtctggcgccgaagtggctaaacctggcgcctccgtgaaggtgtcctgtaaagccagcggctacacattcacccggtacaccatgcactgggtcaagcaggctccaggacaaggcttggagtggatcggctacatcaaccctagccggggctacaccaattacgcccagaagttccagggcaaggccacactgaccaccgacaagagcacaagcaccgcctacatggaactgagcagcctgagaagcgaggacaccgccgtgtactactgtgcccggtactacgacgaccactacagcctggattattggggccagggcacaaccctgaccgtgtcatctggaggcagctctggccaggtgcagctggtgcagtctggcgccgaagttaagaaacctggcgcctccgtgaaggtgtcctgtaaagccagcggcagcagcttcaccggctacaccatgaactgggtcaagcaggctcctggacagggactcgagtggatcggcatcatcaacccctaccagggcgacaccacctacaaccagaagttccagggcaaagtcaccatcaccgtggacaagagcaccagcaccgtgtacatggaactgtccagcctgagaagcgaggacaccgccgtgtactactgtgctagaggcgccggactgtactacttcgactattggggccagggaaccaccgtgaccgttagctctgctagtggcggctccggagataagacccacacatgtcctccatgtcctgctccagaagctgctggcggcccttctgtgttcctgtttcctccaaagcctaaggacaccctgatgatcagcagaacccctgaagtgacctgcgtggtggtggatgtgtctcacgaggaccccgaagtgaagttcaattggtacgtggacggcgtggaagtgcacaacgccaagaccaagcctagagaggaacagtacaacagcacctacagagtggtgtccgtgctgaccgtgctgcaccaggattggctgaacggcaaagagtacaagtgcaaggtgtccaacaaggccctggccgctcctatcgagaaaaccatcagcaaggccaagggccagcctagggaaccccaggtttgtacccttcctccaagccgggatgagctgaccaagaaccaggtgtccctgagctgtgccgtgaagggcttctaccccagcgacattgccgtggaatgggagagcaatggccagcctgagaacaactacaagacaacccctcctgtgctggacagcgacggctcattcttcctggtgagcaagctgacagtcgacaagtccagatggcagcagggcaacgtgttcagttgcagcgtgatgcacgaggccctgcacaaccactacacccagaagtccctgagcctgtctcctgga

SEQ ID NO: 414 - protein, 106 aa, synthetic construct; identical to SEQ ID NO: 95
  source 1..106: note = Trop2 VL

SEQ ID NO: 415 - protein, 6 aa, synthetic construct
  source 1..6: note = Trop2 LCDR1
QDINKY

SEQ ID NO: 416 - skipped

SEQ ID NO: 417 - protein, 8 aa, synthetic construct
  source 1..8: note = Trop2 LCDR3
LQYDDLFT

SEQ ID NO: 418 - protein, 118 aa, synthetic construct; identical to SEQ ID NO: 94
  source 1..118: note = Trop2 VH

SEQ ID NO: 419 - protein, 8 aa, synthetic construct
  source 1..8: note = Trop2 HCDR1
GSSFTGYT

SEQ ID NO: 420 - protein, 7 aa, synthetic construct
  source 1..7: note = Trop2 HCDR2
NPYQGDT

SEQ ID NO: 421 - protein, 11 aa, synthetic construct
  source 1..11: note = Trop2 HCDR3
ARGAGLYYFDY

SEQ ID NO: 422 - protein, 106 aa, synthetic construct; identical to SEQ ID NO: 103
  source 1..106: note = CD3 VL

SEQ ID NO: 423 - protein, 119 aa, synthetic construct; identical to SEQ ID NO: 102
  source 1..119: note = CD3 VH

SEQ ID NO: 424 - protein, 711 aa, synthetic construct
  source 1..711: note = ahCD3xahTrop2_20_holeLALAPA peptide
DIQLTQSPSSLSASVGDRVTITCRASQSISYLNWYQQKPGKSPKRWIYDTSKLASGVPSRFSGSGSGTDYTLTISSMQPEDAATYYCQQWSSNPLTFGGGTKVEIKGGSSGDIQMTQSPSSLSASVGDRVTITCQASQDINKYLAWYQKKPGKAPKLLIHYTSNLQTGVPSRFSGSGSGTDFTFTISSLQPEDIATYYCLQYDDLFTFGQGTKLEIKGGGGSGGSGSGGGGSASGSGQVQLVQSGAEVKKPGASVKVSCKASGSSFTGYTMNWVKQAPGQGLEWIGIINPYQGDTTYNQKFQGKVTITVDKSTSTVYMELSSLRSEDTAVYYCARGAGLYYFDYWGQGTTVTVSSGGSSGQVQLVQSGAEVAKPGASVKVSCKASGYTFTRYTMHWVKQAPGQGLEWIGYINPSRGYTNYAQKFQGKATLTTDKSTSTAYMELSSLRSEDTAVYYCARYYDDHYSLDYWGQGTTLTVSSASGGSGDKTHTCPPCPAPEAAGGPSVFLFPPKPKDTLMISRTPEVTCVVVDVSHEDPEVKFNWYVDGVEVHNAKTKPREEQYNSTYRVVSVLTVLHQDWLNGKEYKCKVSNKALAAPIEKTISKAKGQPREPQVCTLPPSRDELTKNQVSLSCAVKGFYPSDIAVEWESNGQPENNYKTTPPVLDSDGSFFLVSKLTVDKSRWQQGNVFSCSVMHEALHNHYTQKSLSLSPG

SEQ ID NO: 425 - DNA, 2133 bp, synthetic construct
  source 1..2133: mol_type = other DNA; note = ahCD3xahTrop2_20_holeLALAPA - DNA
gacatccagctgacacagagcccttctagcctgtctgccagcgtgggcgacagagtgaccatcacatgtagagccagccagagcatcagctacctgaactggtatcagcagaagcccggcaagagccccaagcggtggatctacgatacaagcaagctggcctctggcgtgcccagcagattttctggctctggcagcggcaccgactacaccctgacaatcagcagcatgcagcctgaggatgccgccacctactactgccagcagtggtccagcaatcccctgacatttggcggaggcaccaaggtggaaatcaagggcggatcttctggagacatccagatgacacagagccctagcagcctgtctgccagcgtgggagacagagtgaccattacctgtcaggccagccaggacatcaacaagtacctggcctggtatcagaagaagcccggcaaggctcctaagctgctgatccactacaccagcaacctgcagacaggcgtgcccagcagattttctggcagcggctctggcaccgacttcaccttcaccataagcagcctgcagcctgaggatatcgccacctactactgcctgcagtacgacgacctgttcacctttggccagggcaccaagctggaaatcaaaggaggcggaggatctggcggatctggaagtggcggcggtggatctgcttctggctctggccaggtgcagctggtgcagtctggcgccgaagttaagaaacctggcgcctccgtgaaggtgtcctgtaaagccagcggcagcagcttcaccggctacaccatgaactgggtcaagcaggctcctggacagggactcgagtggatcggcatcatcaacccctaccagggcgacaccacctacaaccagaagttccagggcaaagtcaccatcaccgtggacaagagcaccagcaccgtgtacatggaactgtccagcctgagaagcgaggacaccgccgtgtactactgtgctagaggcgccggactgtactacttcgactattggggccagggaaccaccgtgaccgttagctctggaggcagctctggccaggttcagctggttcagtctggcgccgaagtggctaaacctggcgcctccgtgaaggtgtcctgtaaagccagcggctacacattcacccggtacaccatgcactgggtcaagcaggctccaggacaaggcttggagtggatcggctacatcaaccctagccggggctacaccaattacgcccagaagttccagggcaaggccacactgaccaccgacaagagcacaagcaccgcctacatggaactgagcagcctgagaagcgaggacaccgccgtgtactactgtgcccggtactacgacgaccactacagcctggattattggggccagggcacaaccctgaccgtgtcatctgctagtggcggctccggagataagacccacacatgtcctccatgtcctgctccagaagctgctggcggcccttctgtgttcctgtttcctccaaagcctaaggacaccctgatgatcagcagaacccctgaagtgacctgcgtggtggtggatgtgtctcacgaggaccccgaagtgaagttcaattggtacgtggacggcgtggaagtgcacaacgccaagaccaagcctagagaggaacagtacaacagcacctacagagtggtgtccgtgctgaccgtgctgcaccaggattggctgaacggcaaagagtacaagtgcaaggtgtccaacaaggccctggccgctcctatcgagaaaaccatcagcaaggccaagggccagcctagggaaccccaggtttgtacccttcctccaagccgggatgagctgaccaagaaccaggtgtccctgagctgtgccgtgaagggcttctaccccagcgacattgccgtggaatgggagagcaatggccagcctgagaacaactacaagacaacccctcctgtgctggacagcgacggctcattcttcctggtgagcaagctgacagtcgacaagtccagatggcagcagggcaacgtgttcagttgcagcgtgatgcacgaggccctgcacaaccactacacccagaagtccctgagcctgtctcctgga

SEQ ID NO: 426 - protein, 571 aa, synthetic construct
  source 1..571: note = Trop2_20ssGShOKT3HholeLALAPA peptide
QVQLVQSGAEVKKPGASVKVSCKASGSSFTGYTMNWVKQAPGQCLEWIGIINPYQGDTTYNQKFQGKVTITVDKSTSTVYMELSSLRSEDTAVYYCARGAGLYYFDYWGQGTTVTVSSGGSGSQVQLVQSGAEVAKPGASVKVSCKASGYTFTRYTMHWVKQAPGQGLEWIGYINPSRGYTNYAQKFQGKATLTTDKSTSTAYMELSSLRSEDTAVYYCARYYDDHYSLDYWGQGTTLTVSSASTKGPSVFPLAPSSKSTSGGTAALGCLVKDYFPEPVTVSWNSGALTSGVHTFPAVLQSSGLYSLSSVVTVPSSSLGTQTYICNVNHKPSNTKVDKKVEPKSCDKTHTCPPCPAPEAAGGPSVFLFPPKPKDTLMISRTPEVTCVVVDVSHEDPEVKFNWYVDGVEVHNAKTKPREEQYNSTYRVVSVLTVLHQDWLNGKEYKCKVSNKALAAPIEKTISKAKGQPREPQVCTLPPSRDELTKNQVSLSCAVKGFYPSDIAVEWESNGQPENNYKTTPPVLDSDGSFFLVSKLTVDKSRWQQGNVFSCSVMHEALHNHYTQKSLSLSPG

SEQ ID NO: 427 - DNA, 1713 bp, synthetic construct
  source 1..1713: mol_type = other DNA; note = Trop2_20ssGShOKT3HholeLALAPA - DNA
caggtgcagctggtgcagtctggcgccgaagttaagaaacctggcgcctccgtgaaggtgtcctgtaaagccagcggcagcagcttcaccggctacaccatgaactgggtcaagcaggctcctggacagtgcctcgagtggatcggcatcatcaacccctaccagggcgacaccacctacaaccagaagttccagggcaaagtcaccatcaccgtggacaagagcaccagcaccgtgtacatggaactgtccagcctgagaagcgaggacaccgccgtgtactactgtgctagaggcgccggactgtactacttcgactattggggccagggaaccaccgtgaccgttagctctggcggctccggaagccaggttcagctggttcagtctggcgccgaagtggctaaacctggcgcctccgtgaaggtgtcctgtaaagccagcggctacacattcacccggtacaccatgcactgggtcaagcaggctccaggacaaggcttggagtggatcggctacatcaaccctagccggggctacaccaattacgcccagaagttccagggcaaggccacactgaccaccgacaagagcacaagcaccgcctacatggaactgagcagcctgagaagcgaggacaccgccgtgtactactgtgcccggtactacgacgaccactacagcctggattattggggccagggcacaaccctgaccgtgtcatctgcttcgaccaagggcccatccgtgtttcctctggctcccagcagcaagtctacaagcggaggaacagccgctctgggctgcctggtcaaggattactttcccgagcctgtgaccgtgtcctggaattctggcgctctgacaagcggcgtgcacacctttccagctgtgctgcaaagcagcggcctgtactctctgagcagcgtggtcacagtgcctagctctagcctgggcacccagacctacatctgcaatgtgaaccacaagcctagcaacaccaaggtggacaagaaggtggaacccaagagctgcgataagacccacacatgtcctccatgtcctgctccagaagctgctggcggcccttctgtgttcctgtttcctccaaagcctaaggacaccctgatgatcagcagaacccctgaagtgacctgcgtggtggtggatgtgtctcacgaggaccccgaagtgaagttcaattggtacgtggacggcgtggaagtgcacaacgccaagaccaagcctagagaggaacagtacaacagcacctacagagtggtgtccgtgctgaccgtgctgcaccaggattggctgaacggcaaagagtacaagtgcaaggtgtccaacaaggccctggccgctcctatcgagaaaaccatcagcaaggccaagggccagcctagggaaccccaggtttgtacccttcctccaagccgggatgagctgaccaagaaccaggtgtccctgagctgtgccgtgaagggcttctaccccagcgacattgccgtggaatgggagagcaatggccagcctgagaacaactacaagacaacccctcctgtgctggacagcgacggctcattcttcctggtgagcaagctgacagtcgacaagtccagatggcagcagggcaacgtgttcagttgcagcgtgatgcacgaggccctgcacaaccactacacccagaagtccctgagcctgtctcctgga

SEQ ID NO: 428 - protein, 118 aa, synthetic construct
  source 1..118: note = Trop2 VH
QVQLVQSGAEVKKPGASVKVSCKASGSSFTGYTMNWVKQAPGQCLEWIGIINPYQGDTTYNQKFQGKVTITVDKSTSTVYMELSSLRSEDTAVYYCARGAGLYYFDYWGQGTTVTVSS

SEQ ID NO: 429 - protein, 8 aa, synthetic construct
  source 1..8: note = Trop2 HCDR1
GSSFTGYT

SEQ ID NO: 430 - protein, 7 aa, synthetic construct
  source 1..7: note = Trop2 HCDR2
NPYQGDT

SEQ ID NO: 431 - protein, 11 aa, synthetic construct
  source 1..11: note = Trop2 HCDR3
ARGAGLYYFDY

SEQ ID NO: 432 - protein, 119 aa, synthetic construct; identical to SEQ ID NO: 102
  source 1..119: note = CD3 VH

SEQ ID NO: 433 - protein, 8 aa, synthetic construct
  source 1..8: note = CD3 HCDR1
GYTFTRYT

SEQ ID NO: 434 - protein, 8 aa, synthetic construct
  source 1..8: note = CD3 HCDR2
INPSRGYT

SEQ ID NO: 435 - protein, 12 aa, synthetic construct
  source 1..12: note = CD3 HCDR3
ARYYDDHYSLDY

SEQ ID NO: 436 - protein, 324 aa, synthetic construct
  source 1..324: note = Trop2_20ssGShOKT3L-hk peptide
DIQMTQSPSSLSASVGDRVTITCQASQDINKYLAWYQKKPGKAPKLLIHYTSNLQTGVPSRFSGSGSGTDFTFTISSLQPEDIATYYCLQYDDLFTFGCGTKLEIKGGSGSDIQLTQSPSSLSASVGDRVTITCRASQSISYLNWYQQKPGKSPKRWIYDTSKLASGVPSRFSGSGSGTDYTLTISSMQPEDAATYYCQQWSSNPLTFGGGTKVEIKRTVAAPSVFIFPPSDEQLKSGTASVVCLLNNFYPREAKVQWKVDNALQSGNSQESVTEQDSKDSTYSLSSTLTLSKADYEKHKVYACEVTHQGLSSPVTKSFNRGEC

SEQ ID NO: 437 - DNA, 972 bp, synthetic construct
  source 1..972: mol_type = other DNA; note = Trop2_20ssGShOKT3L-hk - DNA
gacatccagatgacacagagccctagcagcctgtctgccagcgtgggagacagagtgaccattacctgtcaggccagccaggacatcaacaagtacctggcctggtatcagaagaagcccggcaaggctcctaagctgctgatccactacaccagcaacctgcagacaggcgtgcccagcagattttctggcagcggctctggcaccgacttcaccttcaccataagcagcctgcagcctgaggatatcgccacctactactgcctgcagtacgacgacctgttcacctttggctgcggcaccaagctggaaatcaaaggcggctccggaagcgacatccagctgacacagagcccttctagcctgtctgccagcgtgggcgacagagtgaccatcacatgtagagccagccagagcatcagctacctgaactggtatcagcagaagcccggcaagagccccaagcggtggatctacgatacaagcaagctggcctctggcgtgcccagcagattttctggctctggcagcggcaccgactacaccctgacaatcagcagcatgcagcctgaggatgccgccacctactactgccagcagtggtccagcaatcccctgacatttggcggaggcaccaaggtggaaatcaagcgtacggtggccgctcccagcgtgttcatcttcccacctagcgacgagcagctgaagtccggcacagcctctgtcgtgtgcctgctgaacaacttctacccccgcgaggccaaagtgcagtggaaggtggacaacgccctgcagagcggcaacagccaggaaagcgtgaccgagcaggacagcaaggactccacctacagcctgagcagcaccctgacactgagcaaggccgactacgagaagcacaaggtgtacgcctgcgaagtgacccaccagggcctgtctagccccgtgaccaagagcttcaaccggggcgagtgt

SEQ ID NO: 438 - protein, 327 aa, synthetic construct
  source 1..327: note = Trop2_20ssCl7hOKT3L - peptide
DIQMTQSPSSLSASVGDRVTITCQASQDINKYLAWYQKKPGKAPKLLIHYTSNLQTGVPSRFSGSGSGTDFTFTISSLQPEDIATYYCLQYDDLFTFGCGTKLEIKGPAGLVSGDIQLTQSPSSLSASVGDRVTITCRASQSISYLNWYQQKPGKSPKRWIYDTSKLASGVPSRFSGSGSGTDYTLTISSMQPEDAATYYCQQWSSNPLTFGGGTKVEIKRTVAAPSVFIFPPSDEQLKSGTASVVCLLNNFYPREAKVQWKVDNALQSGNSQESVTEQDSKDSTYSLSSTLTLSKADYEKHKVYACEVTHQGLSSPVTKSFNRGEC

SEQ ID NO: 439 - DNA, 981 bp, synthetic construct
  source 1..981: mol_type = other DNA; note = Trop2_20ssCl7hOKT3L - DNA
gacatccagatgacacagagccctagcagcctgtctgccagcgtgggagacagagtgaccattacctgtcaggccagccaggacatcaacaagtacctggcctggtatcagaagaagcccggcaaggctcctaagctgctgatccactacaccagcaacctgcagacaggcgtgcccagcagattttctggcagcggctctggcaccgacttcaccttcaccataagcagcctgcagcctgaggatatcgccacctactactgcctgcagtacgacgacctgttcacctttggctgcggcaccaagctggaaatcaaaggacctgctggacttgtctccggagacatccagctgacacagagcccttctagcctgtctgccagcgtgggcgacagagtgaccatcacatgtagagccagccagagcatcagctacctgaactggtatcagcagaagcccggcaagagccccaagcggtggatctacgatacaagcaagctggcctctggcgtgcccagcagattttctggctctggcagcggcaccgactacaccctgacaatcagcagcatgcagcctgaggatgccgccacctactactgccagcagtggtccagcaatcccctgacatttggcggaggcaccaaggtggaaatcaagcgtacggtggccgctcccagcgtgttcatcttcccacctagcgacgagcagctgaagtccggcacagcctctgtcgtgtgcctgctgaacaacttctacccccgcgaggccaaagtgcagtggaaggtggacaacgccctgcagagcggcaacagccaggaaagcgtgaccgagcaggacagcaaggactccacctacagcctgagcagcaccctgacactgagcaaggccgactacgagaagcacaaggtgtacgcctgcgaagtgacccaccagggcctgtctagccccgtgaccaagagcttcaaccggggcgagtgt

SEQ ID NO: 440 - protein, 106 aa, synthetic construct
  source 1..106: note = Trop2 VL
DIQMTQSPSSLSASVGDRVTITCQASQDINKYLAWYQKKPGKAPKLLIHYTSNLQTGVPSRFSGSGSGTDFTFTISSLQPEDIATYYCLQYDDLFTFGCGTKLEIK

SEQ ID NO: 441 - protein, 6 aa, synthetic construct
  source 1..6: note = Trop2 LCDR1
QDINKY

SEQ ID NO: 442 - skipped

SEQ ID NO: 443 - protein, 8 aa, synthetic construct
  source 1..8: note = Trop2 LCDR3
LQYDDLFT

SEQ ID NO: 444 - protein, 8 aa, synthetic construct
  source 1..8: note = AA linker
GPAGLVSG

SEQ ID NO: 445 - protein, 106 aa, synthetic construct; identical to SEQ ID NO: 103
  source 1..106: note = CD3 VL

SEQ ID NO: 446 - protein, 5 aa, synthetic construct
  source 1..5: note = CD3 LCDR1
QSISY

SEQ ID NO: 447 - skipped

SEQ ID NO: 448 - protein, 9 aa, synthetic construct
  source 1..9: note = CD3 LCDR3
QQWSSNPLT

SEQ ID NO: 449 - protein, 327 aa, synthetic construct
  source 1..327: note = Trop2_20sscl5hOKT3L peptide
DIQMTQSPSSLSASVGDRVTITCQASQDINKYLAWYQKKPGKAPKLLIHYTSNLQTGVPSRFSGSGSGTDFTFTISSLQPEDIATYYCLQYDDLFTFGCGTKLEIKASTRKAGGDIQLTQSPSSLSASVGDRVTITCRASQSISYLNWYQQKPGKSPKRWIYDTSKLASGVPSRFSGSGSGTDYTLTISSMQPEDAATYYCQQWSSNPLTFGGGTKVEIKRTVAAPSVFIFPPSDEQLKSGTASVVCLLNNFYPREAKVQWKVDNALQSGNSQESVTEQDSKDSTYSLSSTLTLSKADYEKHKVYACEVTHQGLSSPVTKSFNRGEC

SEQ ID NO: 450 - skipped

SEQ ID NO: 451 - protein, 105 aa, synthetic construct
  source 1..105: note = Trop2 VL
IQMTQSPSSLSASVGDRVTITCQASQDINKYLAWYQKKPGKAPKLLIHYTSNLQTGVPSRFSGSGSGTDFTFTISSLQPEDIATYYCLQYDDLFTFGCGTKLEIK

SEQ ID NO: 452 - protein, 6 aa, synthetic construct
  source 1..6: note = Trop2 LCDR1
QDINKY

SEQ ID NO: 453 - skipped

SEQ ID NO: 454 - protein, 8 aa, synthetic construct
  source 1..8: note = Trop2 LCDR3
LQYDDLFT

SEQ ID NO: 455 - skipped

SEQ ID NO: 456 - protein, 5 aa, synthetic construct
  source 1..5: note = CD3 LCDR1
QSISY

SEQ ID NO: 457 - skipped

SEQ ID NO: 458 - protein, 9 aa, synthetic construct
  source 1..9: note = CD3 LCDR3
QQWSSNPLT

SEQ ID NO: 459 - protein, 326 aa, synthetic construct
  source 1..326: note = Trop2_20sscl8hOKT3L peptide
DIQMTQSPSSLSASVGDRVTITCQASQDINKYLAWYQKKPGKAPKLLIHYTSNLQTGVPSRFSGSGSGTDFTFTISSLQPEDIATYYCLQYDDLFTFGCGTKLEIKASTRKAGDIQLTQSPSSLSASVGDRVTITCRASQSISYLNWYQQKPGKSPKRWIYDTSKLASGVPSRFSGSGSGTDYTLTISSMQPEDAATYYCQQWSSNPLTFGGGTKVEIKRTVAAPSVFIFPPSDEQLKSGTASVVCLLNNFYPREAKVQWKVDNALQSGNSQESVTEQDSKDSTYSLSSTLTLSKADYEKHKVYACEVTHQGLSSPVTKSFNRGEC

SEQ ID NO: 460 - skipped

SEQ ID NO: 461 - protein, 105 aa, synthetic construct; identical to SEQ ID NO: 451
  source 1..105: note = Trop2 VL

SEQ ID NO: 462 - protein, 6 aa, synthetic construct
  source 1..6: note = Trop2 LCDR1
QDINKY

SEQ ID NO: 463 - skipped

SEQ ID NO: 464 - protein, 8 aa, synthetic construct
  source 1..8: note = Trop2 LCDR3
LQYDDLFT

SEQ ID NO: 465 - skipped

SEQ ID NO: 466 - protein, 5 aa, synthetic construct
  source 1..5: note = CD3 LCDR1
QSISY

SEQ ID NO: 467 - skipped

SEQ ID NO: 468 - protein, 9 aa, synthetic construct
  source 1..9: note = CD3 LCDR3
QQWSSNPLT

SEQ ID NO: 469 - protein, 326 aa, synthetic construct
  source 1..326: note = Trop2_20sscl9hOKT3L peptide
DIQMTQSPSSLSASVGDRVTITCQASQDINKYLAWYQKKPGKAPKLLIHYTSNLQTGVPSRFSGSGSGTDFTFTISSLQPEDIATYYCLQYDDLFTFGCGTKLEIKSTRKAGGDIQLTQSPSSLSASVGDRVTITCRASQSISYLNWYQQKPGKSPKRWIYDTSKLASGVPSRFSGSGSGTDYTLTISSMQPEDAATYYCQQWSSNPLTFGGGTKVEIKRTVAAPSVFIFPPSDEQLKSGTASVVCLLNNFYPREAKVQWKVDNALQSGNSQESVTEQDSKDSTYSLSSTLTLSKADYEKHKVYACEVTHQGLSSPVTKSFNRGEC

SEQ ID NO: 470 - skipped

SEQ ID NO: 471 - protein, 106 aa, synthetic construct; identical to SEQ ID NO: 440
  source 1..106: note = Trop2 VL

SEQ ID NO: 472 - protein, 6 aa, synthetic construct
  source 1..6: note = Trop2 LCDR1
QDINKY

SEQ ID NO: 473 - skipped

SEQ ID NO: 474 - protein, 8 aa, synthetic construct
  source 1..8: note = Trop2 LCDR3
LQYDDLFT

SEQ ID NO: 475 - protein, 106 aa, synthetic construct; identical to SEQ ID NO: 103
  source 1..106: note = CD3 VL

SEQ ID NO: 476 - protein, 5 aa, synthetic construct
  source 1..5: note = CD3 LCDR1
QSISY

SEQ ID NO: 477 - skipped

SEQ ID NO: 478 - protein, 9 aa, synthetic construct
  source 1..9: note = CD3 LCDR3
QQWSSNPLT

SEQ ID NO: 479 - protein, 476 aa, synthetic construct
  source 1..476: note = Trop2_h20scFvKnobLALAPA peptide
DIQMTQSPSSLSASVGDRVTITCQASQDINKYLAWYQKKPGKAPKLLIHYTSNLQTGVPSRFSGSGSGTDFTFTISSLQPEDIATYYCLQYDDLFTFGQGTKLEIKGGGGSGGSGSGGGGSASGSGQVQLVQSGAEVKKPGASVKVSCKASGSSFTGYTMNWVKQAPGQGLEWIGIINPYQGDTTYNQKFQGKVTITVDKSTSTVYMELSSLRSEDTAVYYCARGAGLYYFDYWGQGTTVTVSSASGGSGDKTHTCPPCPAPEAAGGPSVFLFPPKPKDTLMISRTPEVTCVVVDVSHEDPEVKFNWYVDGVEVHNAKTKPREEQYNSTYRVVSVLTVLHQDWLNGKEYKCKVSNKALAAPIEKTISKAKGQPREPQVYTLPPCRDELTKNQVSLWCLVKGFYPSDIAVEWESNGQPENNYKTTPPVLDSDGSFFLYSKLTVDKSRWQQGNVFSCSVMHEALHNHYTQKSLSLSPG

SEQ ID NO: 480 - skipped

SEQ ID NO: 481 - protein, 574 aa, synthetic construct
  source 1..574: note = Trop2_h20ssCl5hOKT3holeLALAPA (heavy) peptide
QVQLVQSGAEVKKPGASVKVSCKASGSSFTGYTMNWVKQAPGQCLEWIGIINPYQGDTTYNQKFQGKVTITVDKSTSTVYMELSSLRSEDTAVYYCARGAGLYYFDYWGQGTTVTVSSASTRKAGGQVQLVQSGAEVAKPGASVKVSCKASGYTFTRYTMHWVKQAPGQGLEWIGYINPSRGYTNYAQKFQGKATLTTDKSTSTAYMELSSLRSEDTAVYYCARYYDDHYSLDYWGQGTTLTVSSASTKGPSVFPLAPSSKSTSGGTAALGCLVKDYFPEPVTVSWNSGALTSGVHTFPAVLQSSGLYSLSSVVTVPSSSLGTQTYICNVNHKPSNTKVDKKVEPKSCDKTHTCPPCPAPEAAGGPSVFLFPPKPKDTLMISRTPEVTCVVVDVSHEDPEVKFNWYVDGVEVHNAKTKPREEQYNSTYRVVSVLTVLHQDWLNGKEYKCKVSNKALAAPIEKTISKAKGQPREPQVCTLPPSRDELTKNQVSLSCAVKGFYPSDIAVEWESNGQPENNYKTTPPVLDSDGSFFLVSKLTVDKSRWQQGNVFSCSVMHEALHNHYTQKSLSLSPG

SEQ ID NO: 482 - DNA, 1722 bp, synthetic construct
  source 1..1722: mol_type = other DNA; note = Trop2_h20ssCl5hOKT3holeLALAPA (heavy) - DNA
caggtgcagctggtgcagtctggcgccgaagttaagaaacctggcgcctccgtgaaggtgtcctgtaaagccagcggcagcagcttcaccggctacaccatgaactgggtcaagcaggctcctggacagtgcctcgagtggatcggcatcatcaacccctaccagggcgacaccacctacaaccagaagttccagggcaaagtcaccatcaccgtggacaagagcaccagcaccgtgtacatggaactgtccagcctgagaagcgaggacaccgccgtgtactactgtgctagaggcgccggactgtactacttcgactattggggccagggaaccaccgtgaccgttagctctgctagcacacggaaggctggcggacaggttcagctggttcagtctggcgccgaagtggctaaacctggcgcctccgtgaaggtgtcctgtaaagccagcggctacacattcacccggtacaccatgcactgggtcaagcaggctccaggacaaggcttggagtggatcggctacatcaaccctagccggggctacaccaattacgcccagaagttccagggcaaggccacactgaccaccgacaagagcacaagcaccgcctacatggaactgagcagcctgagaagcgaggacaccgccgtgtactactgtgcccggtactacgacgaccactacagcctggattattggggccagggcacaaccctgaccgtgtcatctgcttcgaccaagggcccatccgtgtttcctctggctcccagcagcaagtctacaagcggaggaacagccgctctgggctgcctggtcaaggattactttcccgagcctgtgaccgtgtcctggaattctggcgctctgacaagcggcgtgcacacctttccagctgtgctgcaaagcagcggcctgtactctctgagcagcgtggtcacagtgcctagctctagcctgggcacccagacctacatctgcaatgtgaaccacaagcctagcaacaccaaggtggacaagaaggtggaacccaagagctgcgataagacccacacatgtcctccatgtcctgctccagaagctgctggcggcccttctgtgttcctgtttcctccaaagcctaaggacaccctgatgatcagcagaacccctgaagtgacctgcgtggtggtggatgtgtctcacgaggaccccgaagtgaagttcaattggtacgtggacggcgtggaagtgcacaacgccaagaccaagcctagagaggaacagtacaacagcacctacagagtggtgtccgtgctgaccgtgctgcaccaggattggctgaacggcaaagagtacaagtgcaaggtgtccaacaaggccctggccgctcctatcgagaaaaccatcagcaaggccaagggccagcctagggaaccccaggtttgtacccttcctccaagccgggatgagctgaccaagaaccaggtgtccctgagctgtgccgtgaagggcttctaccccagcgacattgccgtggaatgggagagcaatggccagcctgagaacaactacaagacaacccctcctgtgctggacagcgacggctcattcttcctggtgagcaagctgacagtcgacaagtccagatggcagcagggcaacgtgttcagttgcagcgtgatgcacgaggccctgcacaaccactacacccagaagtccctgagcctgtctcctgga

SEQ ID NO: 483 - protein, 724 aa, synthetic construct
  source 1..724: note = ahrCD20xahrCD19FcknobLALAPA peptide
EIQLTQSPSSLSASVGDRVTITCRASSSVSYIHWFQQKPGSAPKSLIYATSNLASGVPSRFSGSGSGTDYTLTISSLQPEDFATYYCQQWTSNPPTFGGGTKLEIKGGSSGDIQLTQSPSFLSASVGDRVTITCKASQSVDYSGDSYLNWYQQKPGKAPKLLIYDASNLVSGVPSRFSGSGSGTEFTLTISSLQPEDFATYYCQQSTENPWTFGGGTKLEIKGGGGSGGSGSGGGGSASGSGQVQLVQSGAEVKKPGSSVKVSCKASGYAFSSYWMNWVRQAPGQGLEWMGQIWPGDSDTNYAQKFQGRVTITADESTSTAYMELSSLRSEDTAVYYCARRETTTVGRYYYAMDYWGQGTTVTVSSGGSSGQVQLVQPGAEVKKPGASVKMSCKASGYTFTSYNMHWVRQAPGRGLEWMGAIYPGSGDTSYSQKFQGKVTLTADKSTSTAYMELSSLESEDTAVYYCARSTYYGGDWYFNVWGAGTTVTVSAASGGSGDKTHTCPPCPAPEAAGGPSVFLFPPKPKDTLMISRTPEVTCVVVDVSHEDPEVKFNWYVDGVEVHNAKTKPREEQYNSTYRVVSVLTVLHQDWLNGKEYKCKVSNKALAAPIEKTISKAKGQPREPQVYTLPPCRDELTKNQVSLWCLVKGFYPSDIAVEWESNGQPENNYKTTPPVLDSDGSFFLYSKLTVDKSRWQQGNVFSCSVMHEALHNHYTQKSLSLSPG

SEQ ID NO: 484 - DNA, 2172 bp, synthetic construct
  source 1..2172: mol_type = other DNA; note = ahrCD20xahrCD19FcknobLALAPA - DNA
gagatccagctgacacagagcccttctagcctgtctgccagcgtgggcgacagagtgaccatcacatgtagagccagcagcagcgtgtcctatatccactggttccagcagaagcctggaagcgcccctaagtccctgatctatgccacaagcaacctggcctctggcgtgcccagcagattttctggcagcggctctggcaccgactacaccctgacaatcagctccctgcagcctgaggacttcgccacctactactgccagcagtggacaagcaaccctcctacatttggcggaggcaccaagctggaaatcaagggcggatcttctggagacatccagctgacccagtctccaagctttctgagcgccagcgtgggcgacagagtgaccatcacatgtaaagccagccagagcgtggactacagcggcgacagctacctgaactggtatcagcagaagcccggcaaggcccctaagctgctgatctacgacgcctccaatctggtgtccggcgtgcccagcagattttctggctctggaagcggcaccgagttcaccctgaccatatctagcctgcagcctgaggacttcgccacctactactgccagcagagcacagagaacccctggacatttggcggcggaacaaagctggaaatcaagggaggcggaggatctggcggatctggaagtggcggcggtggatctgcttctggctctggccaggttcagctggttcagtctggcgccgaagtgaagaaacctggcagcagcgtgaaggtgtcctgcaaggcctctggctacgccttcagcagctactggatgaactgggtccgacaggcccctggacaaggcttggaatggatgggccaaatctggcctggcgacagcgacaccaattacgcccagaaattccagggcagagtgaccatcaccgccgacgagtctacaagcaccgcctacatggaactgagcagcctgagaagcgaggacaccgccgtgtactactgtgccagacgggaaaccaccaccgtgggcagatattactacgccatggactactggggccagggcaccacagtgacagtctcttctggaggcagctctggccaggttcagctggttcagcctggcgccgaagtgaaaaaacctggcgcctccgtgaagatgagctgcaaggccagcggctacaccttcaccagctacaacatgcactgggtccgacaggcccctggcagaggacttgaatggatgggcgccatctatcccggcagcggcgatacaagctacagccagaaattccagggcaaagtgaccctgaccgccgacaagagcacaagcaccgcctacatggaactgagcagcctggaaagcgaggacaccgccgtgtactactgtgccagaagcacctactacggcggcgactggtacttcaatgtgtggggagccggcaccaccgtgacagtttctgctgcttctggcggctccggagataagacccacacatgtcctccatgtcctgctccagaagctgctggcggcccttctgtgttcctgtttcctccaaagcctaaggacaccctgatgatcagcagaacccctgaagtgacctgcgtggtggtggatgtgtctcacgaggaccccgaagtgaagttcaattggtacgtggacggcgtggaagtgcacaacgccaagaccaagcctagagaggaacagtacaacagcacctacagagtggtgtccgtgctgaccgtgctgcaccaggattggctgaacggcaaagagtacaagtgcaaggtgtccaacaaggccctggccgctcctatcgagaaaaccatcagcaaggccaagggccagcctagggaaccccaggtttacacccttcctccatgccgggatgagctgaccaagaaccaggtgtccctgtggtgtctcgtgaagggcttctaccccagcgacattgccgtggaatgggagagcaatggccagcctgagaacaactacaagacaacccctcctgtgctggacagcgacggctcattcttcctgtacagcaagctgacagtcgacaagtccagatggcagcagggcaacgtgttcagttgcagcgtgatgcacgaggccctgcacaaccactacacccagaagtccctgagcctgtctcctgga

SEQ ID NO: 485 - protein, 106 aa, synthetic construct; identical to SEQ ID NO: 111
  source 1..106: note = CD20 VL

SEQ ID NO: 486 - protein, 6 aa, synthetic construct
  source 1..6: note = CD20 LCDR1
SSSVSY

SEQ ID NO: 487 - skipped

SEQ ID NO: 488 - protein, 9 aa, synthetic construct
  source 1..9: note = CD20 LCDR3
QQWTSNPPT

SEQ ID NO: 489 - protein, 111 aa, synthetic construct; identical to SEQ ID NO: 127
  source 1..111: note = CD19 VL

SEQ ID NO: 490 - protein, 10 aa, synthetic construct
  source 1..10: note = CD19 LCDR1
QSVDYSGDSY

SEQ ID NO: 491 - skipped

SEQ ID NO: 492 - protein, 9 aa, synthetic construct
  source 1..9: note = CD19 LCDR4
QQSTENPWT

SEQ ID NO: 493 - protein, 724 aa, synthetic construct; identical to SEQ ID NO: 320
  source 1..724: note = ahrCD19xahrCD20FcknobLALAPA peptide

SEQ ID NO: 494 - DNA, 2172 bp, synthetic construct
  source 1..2172: mol_type = other DNA; note = ahrCD19xahrCD20FcknobLALAPA - DNA
gacatccagctgacccagtctccaagctttctgagcgccagcgtgggcgacagagtgaccatcacatgtaaagccagccagagcgtggactacagcggcgacagctacctgaactggtatcagcagaagcccggcaaggcccctaagctgctgatctacgacgcctccaatctggtgtccggcgtgcccagcagattttctggctctggaagcggcaccgagttcaccctgaccatatctagcctgcagcctgaggacttcgccacctactactgccagcagagcacagagaacccctggacatttggcggcggaacaaagctggaaatcaagggcggatcttctggagagatccagctgacacagagcccttctagcctgtctgccagcgtgggcgacagagtgaccatcacatgtagagccagcagcagcgtgtcctatatccactggttccagcagaagcctggaagcgcccctaagtccctgatctatgccacaagcaacctggcctctggcgtgcccagcagattttctggcagcggctctggcaccgactacaccctgacaatcagctccctgcagcctgaggacttcgccacctactactgccagcagtggacaagcaaccctcctacatttggcggaggcaccaagctggaaatcaagggaggcggaggatctggcggatctggaagtggcggcggtggatctgcttctggctctggccaggttcagctggttcagcctggcgccgaagtgaaaaaacctggcgcctccgtgaagatgagctgcaaggccagcggctacaccttcaccagctacaacatgcactgggtccgacaggcccctggcagaggacttgaatggatgggcgccatctatcccggcagcggcgatacaagctacagccagaaattccagggcaaagtgaccctgaccgccgacaagagcacaagcaccgcctacatggaactgagcagcctggaaagcgaggacaccgccgtgtactactgtgccagaagcacctactacggcggcgactggtacttcaatgtgtggggagccggcaccaccgtgacagtttctgctggaggcagctctggccaggttcagctggttcagtctggcgccgaagtgaagaaacctggcagcagcgtgaaggtgtcctgcaaggcctctggctacgccttcagcagctactggatgaactgggtccgacaggcccctggacaaggcttggaatggatgggccaaatctggcctggcgacagcgacaccaattacgcccagaaattccagggcagagtgaccatcaccgccgacgagtctacaagcaccgcctacatggaactgagcagcctgagaagcgaggacaccgccgtgtactactgtgccagacgggaaaccaccaccgtgggcagatattactacgccatggactactggggccagggcaccacagtgacagtctcttctgcttctggcggctccggagataagacccacacatgtcctccatgtcctgctccagaagctgctggcggcccttctgtgttcctgtttcctccaaagcctaaggacaccctgatgatcagcagaacccctgaagtgacctgcgtggtggtggatgtgtctcacgaggaccccgaagtgaagttcaattggtacgtggacggcgtggaagtgcacaacgccaagaccaagcctagagaggaacagtacaacagcacctacagagtggtgtccgtgctgaccgtgctgcaccaggattggctgaacggcaaagagtacaagtgcaaggtgtccaacaaggccctggccgctcctatcgagaaaaccatcagcaaggccaagggccagcctagggaaccccaggtttacacccttcctccatgccgggatgagctgaccaagaaccaggtgtccctgtggtgtctcgtgaagggcttctaccccagcgacattgccgtggaatgggagagcaatggccagcctgagaacaactacaagacaacccctcctgtgctggacagcgacggctcattcttcctgtacagcaagctgacagtcgacaagtccagatggcagcagggcaacgtgttcagttgcagcgtgatgcacgaggccctgcacaaccactacacccagaagtccctgagcctgtctcctgga

SEQ ID NO: 495 - protein, 111 aa, synthetic construct; identical to SEQ ID NO: 127
  source 1..111: note = CD19 VL

SEQ ID NO: 496 - protein, 10 aa, synthetic construct
  source 1..10: note = CD19 LCDR1
QSVDYSGDSY

SEQ ID NO: 497 - skipped

SEQ ID NO: 498 - protein, 9 aa, synthetic construct
  source 1..9: note = CD19 LCDR3
QQSTENPWT

SEQ ID NO: 499 - protein, 124 aa, synthetic construct; identical to SEQ ID NO: 126
  source 1..124: note = CD19 VH

SEQ ID NO: 500 - protein, 8 aa, synthetic construct
  source 1..8: note = CD19 HCDR1
GYAFSSYW

SEQ ID NO: 501 - protein, 8 aa, synthetic construct
  source 1..8: note = CD19 HCDR2
IWPGDSDT

SEQ ID NO: 502 - protein, 17 aa, synthetic construct
  source 1..17: note = CD19 HCDR3
ARRETTTVGRYYYAMDY

SEQ ID NO: 503 - protein, 106 aa, synthetic construct; identical to SEQ ID NO: 111
  source 1..106: note = CD20 VL

SEQ ID NO: 504 - protein, 6 aa, synthetic construct
  source 1..6: note = CD20 LCDR1
SSSVSY

SEQ ID NO: 505 - skipped

SEQ ID NO: 506 - protein, 9 aa, synthetic construct
  source 1..9: note = CD20 LCDR3
QQWTSNPPT

SEQ ID NO: 507 - protein, 121 aa, synthetic construct
  source 1..121: note = CD20 VH
QVQLVQPGAEVKKPGASVKMSCKASGYTFTSYNMHWVRQAPGRGLEWMGAIYPGSGDTSYSQKFQGKVTLTADKSTSTAYMELSSLESEDTAVYYCARSTYYGGDWYFNVWGAGTTVTVSA

SEQ ID NO: 508 - protein, 8 aa, synthetic construct
  source 1..8: note = CD20 HCDR1
GYTFTSYN

SEQ ID NO: 509 - protein, 8 aa, synthetic construct
  source 1..8: note = CD20 HCDR2
IYPGSGDT

SEQ ID NO: 510 - protein, 14 aa, synthetic construct
  source 1..14: note = CD20 HCDR3
ARSTYYGGDWYFNV

SEQ ID NO: 511 - protein, 714 aa, synthetic construct
  source 1..714: note = ahCD28_TgcsxahCD3L1Hcc hIgG1LALAPA
DIQMTQSPSSLSASVGDRVTITCHASQNIYVWLNWYQQKPGKAPKLLIYKASNLHTGVPSRFSGSGSGTDFTLTISSLQPEDFATYYCQQGQTYPYTFGGGTKVEIKGGSSGDIQLTQSPSSLSASVGDRVTITCRASQSISYLNWYQQKPGKSPKRWIYDTSKLASGVPSRFSGSGSGTDYTLTISSMQPEDAATYYCQQWSSNPLTFGGGTKVEIKGGGGSGGSGSGGGGSASGSGQVQLVQSGAEVAKPGASVKVSCKASGYTFTRYTMHWVKQAPGQGLEWIGYINPSRGYTNYAQKFQGKATLTTDKSTSTAYMELSSLRSEDTAVYYCARYYDDHYSLDYWGQGTTLTVSSGGSSGQVQLVQSGAEVKKPGASVKVSCKASGYTFTSYYIHWVRQAPGQGLEWIGSIYPGNVNTNYNEKFKDRATLTVDTSISTAYMELSRLRSDDTAVYFCTRSHYGLDWNFDVWGQGTTVTVSSASGGSGDKTHTCPPCPAPEAAGGPSVFLFPPKPKDTLMISRTPEVTCVVVDVSHEDPEVKFNWYVDGVEVHNAKTKPREEQYNSTYRVVSVLTVLHQDWLNGKEYKCKVSNKALAAPIEKTISKAKGQPREPQVCTLPPSRDELTKNQVSLSCAVKGFYPSDIAVEWESNGQPENNYKTTPPVLDSDGSFFLVSKLTVDKSRWQQGNVFSCSVMHEALHNHYTQKSLSLSPG

SEQ ID NO: 512 - DNA, 2142 bp, synthetic construct
  source 1..2142: mol_type = other DNA; note = ahCD28_TgcsxahCD3L1Hcc hIgG1LALAPA
gacatccagatgacacagagccctagcagcctgtctgccagcgtgggagacagagtgaccatcacatgtcacgccagccagaacatctacgtgtggctgaactggtatcagcagaagcccggcaaggcccctaagctgctgatctacaaggccagcaatctgcacaccggcgtgcccagcagattttctggctctggcagcggcaccgacttcaccctgaccatatctagcctgcagcctgaggacttcgccacctactattgtcagcagggccagacatacccctacacctttggcggcggaacaaaggtggaaatcaagggcggaagcagcggcgacatccagctgacacagagcccttctagcctgtctgccagcgtgggcgacagagtgaccatcacatgtagagccagccagagcatcagctacctgaactggtatcagcagaagcccggcaagagccccaagcggtggatctacgatacaagcaagctggcctctggcgtgcccagcagattttctggctctggcagcggcaccgactacaccctgacaatcagcagcatgcagcctgaggatgccgccacctactactgccagcagtggtccagcaatcccctgacatttggcggaggcaccaaggtggaaatcaagggtggcggaggaagcggcggatcaggatctggcggcggaggatctgctagcggatctggacaggttcagctggttcagtctggcgccgaagtggctaaacctggcgcctccgtgaaggtgtcctgtaaagccagcggctacacattcacccggtacaccatgcactgggtcaagcaggctccaggacaaggcttggagtggatcggctacatcaaccctagccggggctacaccaattacgcccagaagttccagggcaaggccacactgaccaccgacaagagcacaagcaccgcctacatggaactgagcagcctgagaagcgaggacaccgccgtgtactactgtgcccggtactacgacgaccactacagcctggattattggggccagggcacaaccctgaccgtgtcatctggtggatctagtggccaggttcagctggttcagtctggcgccgaagtgaagaaacctggcgcctctgtgaaggtgtcctgcaaggccagcggctacacctttaccagctactacatccactgggtccgacaggcccctggacaaggactggaatggatcggcagcatctaccccggcaacgtgaacaccaactacaacgagaagttcaaggaccgggccacactgaccgtggacacctctatcagcaccgcctacatggaactgagccggctgagatccgatgataccgccgtgtacttctgcaccagaagccactacggcctggactggaacttcgatgtgtggggccagggcaccaccgtgacagtttcttctgcttctggaggctccggagataagacccacacatgtcctccatgtcctgctccagaggctgctggtggcccttccgtgtttctgttccctccaaagcctaaggacaccctgatgatcagcaggacccctgaagtgacctgcgtggtggtggatgtgtctcacgaggacccagaagtgaagttcaattggtacgtggacggcgtggaagtgcacaacgccaagaccaagcctagagaggaacagtacaacagcacctacagagtggtgtccgtgctgaccgtgctgcaccaggattggctgaacggcaaagagtacaagtgcaaggtgtccaacaaggccctggccgctcctatcgagaaaaccatcagcaaggccaagggccagcctcgcgaacctcaagtctgtacactgcctcctagccgggacgagctgaccaagaatcaggtgtcactgagctgcgccgtgaagggcttttaccccagcgacattgccgtggaatgggagagcaatggccagccagagaacaactacaagacaacccctcctgtgctggacagcgacggctcatttttcctggtgtccaagctgacagtggacaagagcagatggcagcagggcaacgtgttcagctgcagcgtgatgcacgaggccctgcacaaccactacacccagaaaagcctgtctctgagccctggc

SEQ ID NO: 513 - protein, 714 aa, synthetic construct
  source 1..714: note = ahCD3xahCD28_Tgcs L1 Hcc hIgG1LALAPA
DIQLTQSPSSLSASVGDRVTITCRASQSISYLNWYQQKPGKSPKRWIYDTSKLASGVPSRFSGSGSGTDYTLTISSMQPEDAATYYCQQWSSNPLTFGGGTKVEIKGGSSGDIQMTQSPSSLSASVGDRVTITCHASQNIYVWLNWYQQKPGKAPKLLIYKASNLHTGVPSRFSGSGSGTDFTLTISSLQPEDFATYYCQQGQTYPYTFGGGTKVEIKGGGGSGGSGSGGGGSASGSGQVQLVQSGAEVKKPGASVKVSCKASGYTFTSYYIHWVRQAPGQGLEWIGSIYPGNVNTNYNEKFKDRATLTVDTSISTAYMELSRLRSDDTAVYFCTRSHYGLDWNFDVWGQGTTVTVSSGGSSGQVQLVQSGAEVAKPGASVKVSCKASGYTFTRYTMHWVKQAPGQGLEWIGYINPSRGYTNYAQKFQGKATLTTDKSTSTAYMELSSLRSEDTAVYYCARYYDDHYSLDYWGQGTTLTVSSASGGSGDKTHTCPPCPAPEAAGGPSVFLFPPKPKDTLMISRTPEVTCVVVDVSHEDPEVKFNWYVDGVEVHNAKTKPREEQYNSTYRVVSVLTVLHQDWLNGKEYKCKVSNKALAAPIEKTISKAKGQPREPQVCTLPPSRDELTKNQVSLSCAVKGFYPSDIAVEWESNGQPENNYKTTPPVLDSDGSFFLVSKLTVDKSRWQQGNVFSCSVMHEALHNHYTQKSLSLSPG

SEQ ID NO: 514 - DNA, 2142 bp, synthetic construct
  source 1..2142: mol_type = other DNA; note = ahCD3xahCD28_Tgcs L1 Hcc hIgG1LALAPA
gacatccagctgacacagagcccttctagcctgtctgccagcgtgggcgacagagtgaccatcacatgtagagccagccagagcatcagctacctgaactggtatcagcagaagcccggcaagagccccaagcggtggatctacgatacaagcaagctggcctctggcgtgcccagcagattttctggctctggcagcggcaccgactacaccctgacaatcagcagcatgcagcctgaggatgccgccacctactactgccagcagtggtccagcaatcccctgacatttggcggaggcaccaaggtggaaatcaagggcggaagcagcggcgacatccagatgacacagagccctagcagcctgtctgccagcgtgggagacagagtgaccatcacatgtcacgccagccagaacatctacgtgtggctgaactggtatcagcagaagcccggcaaggcccctaagctgctgatctacaaggccagcaatctgcacaccggcgtgcccagcagattttctggctctggcagcggcaccgacttcaccctgaccatatctagcctgcagcctgaggacttcgccacctactattgtcagcagggccagacatacccctacacctttggcggcggaacaaaggtggaaatcaagggtggcggaggaagcggcggatcaggatctggcggcggaggatctgctagcggatctggacaggttcagctggttcagtctggcgccgaagtgaagaaacctggcgcctctgtgaaggtgtcctgcaaggccagcggctacacctttaccagctactacatccactgggtccgacaggcccctggacaaggactggaatggatcggcagcatctaccccggcaacgtgaacaccaactacaacgagaagttcaaggaccgggccacactgaccgtggacacctctatcagcaccgcctacatggaactgagccggctgagatccgatgataccgccgtgtacttctgcaccagaagccactacggcctggactggaacttcgatgtgtggggccagggcaccaccgtgacagtttcttctggtggatctagtggccaggttcagctggttcagtctggcgccgaagtggctaaacctggcgcctccgtgaaggtgtcctgtaaagccagcggctacacattcacccggtacaccatgcactgggtcaagcaggctccaggacaaggcttggagtggatcggctacatcaaccctagccggggctacaccaattacgcccagaagttccagggcaaggccacactgaccaccgacaagagcacaagcaccgcctacatggaactgagcagcctgagaagcgaggacaccgccgtgtactactgtgcccggtactacgacgaccactacagcctggattattggggccagggcacaaccctgaccgtgtcatctgcttctggaggctccggagataagacccacacatgtcctccatgtcctgctccagaggctgctggtggcccttccgtgtttctgttccctccaaagcctaaggacaccctgatgatcagcaggacccctgaagtgacctgcgtggtggtggatgtgtctcacgaggacccagaagtgaagttcaattggtacgtggacggcgtggaagtgcacaacgccaagaccaagcctagagaggaacagtacaacagcacctacagagtggtgtccgtgctgaccgtgctgcaccaggattggctgaacggcaaagagtacaagtgcaaggtgtccaacaaggccctggccgctcctatcgagaaaaccatcagcaaggccaagggccagcctcgcgaacctcaagtctgtacactgcctcctagccgggacgagctgaccaagaatcaggtgtcactgagctgcgccgtgaagggcttttaccccagcgacattgccgtggaatgggagagcaatggccagccagagaacaactacaagacaacccctcctgtgctggacagcgacggctcatttttcctggtgtccaagctgacagtggacaagagcagatggcagcagggcaacgtgttcagctgcagcgtgatgcacgaggccctgcacaaccactacacccagaaaagcctgtctctgagccctggc

SEQ ID NO: 515 - protein, 718 aa, synthetic construct
  source 1..718: note = ahCD28_TgcsxahCD3_hUCH L1 Hcc hIgG1LALAPA peptide
DIQMTQSPSSLSASVGDRVTITCHASQNIYVWLNWYQQKPGKAPKLLIYKASNLHTGVPSRFSGSGSGTDFTLTISSLQPEDFATYYCQQGQTYPYTFGGGTKVEIKGGSSGDIQMTQSPSSLSASVGDRVTITCQASQDIRNYLNWYQQKPGKAPKLLIYRASRLHTGVPSRFSGSGSGTDFTLTISSLQPEDIATYYCQQGNTLPWTFGQGTKVEIKGGGGSGGSGSGGGGSASGSGQVQLVQSGAEVVKPGASVKVSCKASGYTFTGYTMNWVRQAPGQGLEWMGLINPYRGSTSYSQKFQGRATLTVDKSTSTAYMELSSLRSEDTAVYYCARSGYYGDSDWYFDSWGQGTLVTVSSGGSSGQVQLVQSGAEVKKPGASVKVSCKASGYTFTSYYIHWVRQAPGQGLEWIGSIYPGNVNTNYNEKFKDRATLTVDTSISTAYMELSRLRSDDTAVYFCTRSHYGLDWNFDVWGQGTTVTVSSASGGSGDKTHTCPPCPAPEAAGGPSVFLFPPKPKDTLMISRTPEVTCVVVDVSHEDPEVKFNWYVDGVEVHNAKTKPREEQYNSTYRVVSVLTVLHQDWLNGKEYKCKVSNKALAAPIEKTISKAKGQPREPQVCTLPPSRDELTKNQVSLSCAVKGFYPSDIAVEWESNGQPENNYKTTPPVLDSDGSFFLVSKLTVDKSRWQQGNVFSCSVMHEALHNHYTQKSLSLSPG

SEQ ID NO: 516 - DNA, 2154 bp, synthetic construct
  source 1..2154: mol_type = other DNA; note = ahCD28_TgcsxahCD3_hUCH L1 Hcc hIgG1LALAPA - DNA
gacatccagatgacacagagccctagcagcctgtctgccagcgtgggagacagagtgaccatcacatgtcacgccagccagaacatctacgtgtggctgaactggtatcagcagaagcccggcaaggcccctaagctgctgatctacaaggccagcaatctgcacaccggcgtgcccagcagattttctggctctggcagcggcaccgacttcaccctgaccatatctagcctgcagcctgaggacttcgccacctactattgtcagcagggccagacatacccctacacctttggcggcggaacaaaggtggaaatcaagggcggaagcagcggcgacatccagatgacacagagccctagcagcctgtctgccagcgtgggagacagagtgaccattacctgtcaggccagccaggacatccggaactacctgaactggtatcagcagaagcccggcaaggcccctaagctgctgatctacagagccagcagactgcacaccggcgtgcccagcagattttctggcagcggctctggcaccgacttcaccctgaccatatctagcctgcagcctgaggatatcgccacctactactgccagcagggcaacaccctgccttggacatttggccagggcaccaaggtggaaatcaagggtggcggaggaagcggcggatcaggatctggcggcggaggatctgctagcggatctggacaggttcagctggttcagtctggcgccgaggttgtgaaacctggcgcctccgtgaaggtgtcctgtaaagccagcggctacacctttaccggctacacaatgaactgggtccgacaggcccctggacagggacttgaatggatgggcctgatcaatccctacagaggcagcaccagctacagccagaagttccagggcagagccacactgaccgtggacaagagcacaagcaccgcctacatggaactgagcagcctgagaagcgaggacaccgccgtgtactactgtgccagaagcggctactacggcgacagcgactggtactttgatagctggggccagggcaccctggtcacagtttcttctggtggatctagtggccaggttcagctggttcagtctggcgccgaagtgaagaaacctggcgcctctgtgaaggtgtcctgcaaggccagcggctacacctttaccagctactacatccactgggtccgacaggcccctggacaaggactggaatggatcggcagcatctaccccggcaacgtgaacaccaactacaacgagaagttcaaggaccgggccacactgaccgtggacacctctatcagcaccgcctacatggaactgagccggctgagatccgatgataccgccgtgtacttctgcaccagaagccactacggcctggactggaacttcgatgtgtggggccagggcaccaccgtgacagtttcttctgcttctggaggctccggagataagacccacacatgtcctccatgtcctgctccagaggctgctggtggcccttccgtgtttctgttccctccaaagcctaaggacaccctgatgatcagcaggacccctgaagtgacctgcgtggtggtggatgtgtctcacgaggacccagaagtgaagttcaattggtacgtggacggcgtggaagtgcacaacgccaagaccaagcctagagaggaacagtacaacagcacctacagagtggtgtccgtgctgaccgtgctgcaccaggattggctgaacggcaaagagtacaagtgcaaggtgtccaacaaggccctggccgctcctatcgagaaaaccatcagcaaggccaagggccagcctcgcgaacctcaagtctgtacactgcctcctagccgggacgagctgaccaagaatcaggtgtcactgagctgcgccgtgaagggcttttaccccagcgacattgccgtggaatgggagagcaatggccagccagagaacaactacaagacaacccctcctgtgctggacagcgacggctcatttttcctggtgtccaagctgacagtggacaagagcagatggcagcagggcaacgtgttcagctgcagcgtgatgcacgaggccctgcacaaccactacacccagaaaagcctgtctctgagccctggc

SEQ ID NO: 517 - protein, 718 aa, synthetic construct
  source 1..718: note = ahCD3_hUCHxahCD28_Tgcs L1 Hcc hIgG1LALAPA peptide
DIQMTQSPSSLSASVGDRVTITCQASQDIRNYLNWYQQKPGKAPKLLIYRASRLHTGVPSRFSGSGSGTDFTLTISSLQPEDIATYYCQQGNTLPWTFGQGTKVEIKGGSSGDIQMTQSPSSLSASVGDRVTITCHASQNIYVWLNWYQQKPGKAPKLLIYKASNLHTGVPSRFSGSGSGTDFTLTISSLQPEDFATYYCQQGQTYPYTFGGGTKVEIKGGGGSGGSGSGGGGSASGSGQVQLVQSGAEVKKPGASVKVSCKASGYTFTSYYIHWVRQAPGQGLEWIGSIYPGNVNTNYNEKFKDRATLTVDTSISTAYMELSRLRSDDTAVYFCTRSHYGLDWNFDVWGQGTTVTVSSGGSSGQVQLVQSGAEVVKPGASVKVSCKASGYTFTGYTMNWVRQAPGQGLEWMGLINPYRGSTSYSQKFQGRATLTVDKSTSTAYMELSSLRSEDTAVYYCARSGYYGDSDWYFDSWGQGTLVTVSSASGGSGDKTHTCPPCPAPEAAGGPSVFLFPPKPKDTLMISRTPEVTCVVVDVSHEDPEVKFNWYVDGVEVHNAKTKPREEQYNSTYRVVSVLTVLHQDWLNGKEYKCKVSNKALAAPIEKTISKAKGQPREPQVCTLPPSRDELTKNQVSLSCAVKGFYPSDIAVEWESNGQPENNYKTTPPVLDSDGSFFLVSKLTVDKSRWQQGNVFSCSVMHEALHNHYTQKSLSLSPG

SEQ ID NO: 518 - DNA, 2154 bp, synthetic construct
  source 1..2154: mol_type = other DNA; note = ahCD3_hUCHxahCD28_Tgcs L1 Hcc hIgG1LALAPA - DNA
gacatccagatgacacagagccctagcagcctgtctgccagcgtgggagacagagtgaccattacctgtcaggccagccaggacatccggaactacctgaactggtatcagcagaagcccggcaaggcccctaagctgctgatctacagagccagcagactgcacaccggcgtgcccagcagattttctggcagcggctctggcaccgacttcaccctgaccatatctagcctgcagcctgaggatatcgccacctactactgccagcagggcaacaccctgccttggacatttggccagggcaccaaggtggaaatcaagggcggaagcagcggcgacatccagatgacacagagccctagcagcctgtctgccagcgtgggagacagagtgaccatcacatgtcacgccagccagaacatctacgtgtggctgaactggtatcagcagaagcccggcaaggcccctaagctgctgatctacaaggccagcaatctgcacaccggcgtgcccagcagattttctggctctggcagcggcaccgacttcaccctgaccatatctagcctgcagcctgaggacttcgccacctactattgtcagcagggccagacatacccctacacctttggcggcggaacaaaggtggaaatcaagggtggcggaggaagcggcggatcaggatctggcggcggaggatctgctagcggatctggacaggttcagctggttcagtctggcgccgaagtgaagaaacctggcgcctctgtgaaggtgtcctgcaaggccagcggctacacctttaccagctactacatccactgggtccgacaggcccctggacaaggactggaatggatcggcagcatctaccccggcaacgtgaacaccaactacaacgagaagttcaaggaccgggccacactgaccgtggacacctctatcagcaccgcctacatggaactgagccggctgagatccgatgataccgccgtgtacttctgcaccagaagccactacggcctggactggaacttcgatgtgtggggccagggcaccaccgtgacagtttcttctggtggatctagtggccaggttcagctggttcagtctggcgccgaggttgtgaaacctggcgcctccgtgaaggtgtcctgtaaagccagcggctacacctttaccggctacacaatgaactgggtccgacaggcccctggacagggacttgaatggatgggcctgatcaatccctacagaggcagcaccagctacagccagaagttccagggcagagccacactgaccgtggacaagagcacaagcaccgcctacatggaactgagcagcctgagaagcgaggacaccgccgtgtactactgtgccagaagcggctactacggcgacagcgactggtactttgatagctggggccagggcaccctggtcacagtttcttctgcttctggaggctccggagataagacccacacatgtcctccatgtcctgctccagaggctgctggtggcccttccgtgtttctgttccctccaaagcctaaggacaccctgatgatcagcaggacccctgaagtgacctgcgtggtggtggatgtgtctcacgaggacccagaagtgaagttcaattggtacgtggacggcgtggaagtgcacaacgccaagaccaagcctagagaggaacagtacaacagcacctacagagtggtgtccgtgctgaccgtgctgcaccaggattggctgaacggcaaagagtacaagtgcaaggtgtccaacaaggccctggccgctcctatcgagaaaaccatcagcaaggccaagggccagcctcgcgaacctcaagtctgtacactgcctcctagccgggacgagctgaccaagaatcaggtgtcactgagctgcgccgtgaagggcttttaccccagcgacattgccgtggaatgggagagcaatggccagccagagaacaactacaagacaacccctcctgtgctggacagcgacggctcatttttcctggtgtccaagctgacagtggacaagagcagatggcagcagggcaacgtgttcagctgcagcgtgatgcacgaggccctgcacaaccactacacccagaaaagcctgtctctgagccctggc

SEQ ID NO: 519 - protein, 107 aa, synthetic construct
  source 1..107: note = ahCD3_hUCH VL
DIQMTQSPSSLSASVGDRVTITCQASQDIRNYLNWYQQKPGKAPKLLIYRASRLHTGVPSRFSGSGSGTDFTLTISSLQPEDIATYYCQQGNTLPWTFGQGTKVEIK

SEQ ID NO: 520 - protein, 11 aa, synthetic construct
  source 1..11: note = ahCD3_hUCH LCDR1
QASQDIRNYLN

SEQ ID NO: 521 - protein, 7 aa, synthetic construct
  source 1..7: note = ahCD3_hUCH LCDR2
RASRLHT

SEQ ID NO: 522 - protein, 9 aa, synthetic construct
  source 1..9: note = ahCD3_hUCH LCDR3
QQGNTLPWT

SEQ ID NO: 523 - protein, 122 aa, synthetic construct
  source 1..122: note = ahCD3_hUCH VH
QVQLVQSGAEVVKPGASVKVSCKASGYTFTGYTMNWVRQAPGQGLEWMGLINPYRGSTSYSQKFQGRATLTVDKSTSTAYMELSSLRSEDTAVYYCARSGYYGDSDWYFDSWGQGTLVTVSS

SEQ ID NO: 524 - protein, 7 aa, synthetic construct
  source 1..7: note = ahCD3_hUCH HCDR1
GYTFTGY

SEQ ID NO: 525 - protein, 6 aa, synthetic construct
  source 1..6: note = ahCD3_hUCH HCDR2
NPYRGS

SEQ ID NO: 526 - protein, 13 aa, synthetic construct
  source 1..13: note = ahCD3_hUCH HCDR3
SGYYGDSDWYFDS

SEQ ID NO: 527 - protein, 247 aa, synthetic construct
  source 1..247: note = CD28 VL
DIQMTQSPSSLSASVGDRVTITCHASQNIYVWLNWYQQKPGKAPKLLIYKASNLHTGVPSRFSGSGSGTDFTLTISSLQPEDFATYYCQQGQTYPYTFGGGTKVEIKGGGGSGGSGSGGGGSASGSGQVQLVQSGAEVKKPGASVKVSCKASGYTFTSYYIHWVRQAPGQGLEWIGSIYPGNVNTNYNEKFKDRATLTVDTSISTAYMELSRLRSDDTAVYFCTRSHYGLDWNFDVWGQGTTVTVSS

SEQ ID NO: 528 - protein, 120 aa, synthetic construct; identical to SEQ ID NO: 54
  source 1..120: note = CD28 VH

SEQ ID NO: 529 - protein, 724 aa, synthetic construct
  source 1..724: note = ahrCD20xahrCD19Kcc hIgG1LALAPA peptide
EIQLTQSPSSLSASVGDRVTITCRASSSVSYIHWFQQKPGSAPKSLIYATSNLASGVPSRFSGSGSGTDYTLTISSLQPEDFATYYCQQWTSNPPTFGGGTKLEIKGGSSGDIQLTQSPSFLSASVGDRVTITCKASQSVDYSGDSYLNWYQQKPGKAPKLLIYDASNLVSGVPSRFSGSGSGTEFTLTISSLQPEDFATYYCQQSTENPWTFGGGTKLEIKGGGGSGGSGSGGGGSASGSGQVQLVQSGAEVKKPGSSVKVSCKASGYAFSSYWMNWVRQAPGQGLEWMGQIWPGDSDTNYAQKFQGRVTITADESTSTAYMELSSLRSEDTAVYYCARRETTTVGRYYYAMDYWGQGTTVTVSSGGSSGQVQLVQPGAEVKKPGASVKMSCKASGYTFTSYNMHWVRQAPGRGLEWMGAIYPGNGDTSYNQKFQGRVTLTADKSTSTAYMELSSLESEDTAVYYCARSTYYGGDWYFNVWGAGTTVTVSAASGGSGDKTHTCPPCPAPEAAGGPSVFLFPPKPKDTLMISRTPEVTCVVVDVSHEDPEVKFNWYVDGVEVHNAKTKPREEQYNSTYRVVSVLTVLHQDWLNGKEYKCKVSNKALAAPIEKTISKAKGQPREPQVYTLPPCRDELTKNQVSLWCLVKGFYPSDIAVEWESNGQPENNYKTTPPVLDSDGSFFLYSKLTVDKSRWQQGNVFSCSVMHEALHNHYTQKSLSLSPG

SEQ ID NO: 530 - DNA, 2172 bp, synthetic construct
  source 1..2172: mol_type = other DNA; note = ahrCD20xahrCD19Kcc hIgG1LALAPA - DNA
gagatccagctgacacagagcccttctagcctgtctgccagcgtgggcgacagagtgaccatcacatgtagagccagcagcagcgtgtcctatatccactggttccagcagaagcctggaagcgcccctaagtccctgatctatgccacaagcaacctggcctctggcgtgcccagcagattttctggcagcggctctggcaccgactacaccctgacaatcagctccctgcagcctgaggacttcgccacctactactgccagcagtggacaagcaaccctcctacatttggcggaggcaccaagctggaaatcaagggcggatcttctggagacatccagctgacccagtctccaagctttctgagcgccagcgtgggcgacagagtgaccatcacatgtaaagccagccagagcgtggactacagcggcgacagctacctgaactggtatcagcagaagcccggcaaggcccctaagctgctgatctacgacgcctccaatctggtgtccggcgtgcccagcagattttctggctctggaagcggcaccgagttcaccctgaccatatctagcctgcagcctgaggacttcgccacctactactgccagcagagcacagagaacccctggacatttggcggcggaacaaagctggaaatcaagggaggcggaggatctggcggatctggaagtggcggcggtggatctgcttctggctctggccaggttcagctggttcagtctggcgccgaagtgaagaaacctggcagcagcgtgaaggtgtcctgcaaggcctctggctacgccttcagcagctactggatgaactgggtccgacaggcccctggacaaggcttggaatggatgggccaaatctggcctggcgacagcgacaccaattacgcccagaaattccagggcagagtgaccatcaccgccgacgagtctacaagcaccgcctacatggaactgagcagcctgagaagcgaggacaccgccgtgtactactgtgccagacgggaaaccaccaccgtgggcagatattactacgccatggactactggggccagggcaccacagtgacagtctcttctggaggcagctctggccaggttcagctggttcagcctggcgccgaagtgaaaaaacctggcgcctccgtgaagatgagctgcaaggccagcggctacaccttcaccagctacaacatgcactgggtccgacaggcccctggcagaggacttgaatggatgggcgccatctatcccggcaacggcgatacaagctacaaccagaaattccagggcagagtgaccctgaccgccgacaagagcacaagcaccgcctacatggaactgagcagcctggaaagcgaggacaccgccgtgtactactgtgccagaagcacctactacggcggcgactggtacttcaatgtgtggggagccggcaccaccgtgacagtttctgctgcttctggcggctccggagataagacccacacatgtcctccatgtcctgctccagaagctgctggcggcccttctgtgttcctgtttcctccaaagcctaaggacaccctgatgatcagcagaacccctgaagtgacctgcgtggtggtggatgtgtctcacgaggaccccgaagtgaagttcaattggtacgtggacggcgtggaagtgcacaacgccaagaccaagcctagagaggaacagtacaacagcacctacagagtggtgtccgtgctgaccgtgctgcaccaggattggctgaacggcaaagagtacaagtgcaaggtgtccaacaaggccctggccgctcctatcgagaaaaccatcagcaaggccaagggccagcctagggaaccccaggtttacacccttcctccatgccgggatgagctgaccaagaaccaggtgtccctgtggtgtctcgtgaagggcttctaccccagcgacattgccgtggaatgggagagcaatggccagcctgagaacaactacaagacaacccctcctgtgctggacagcgacggctcattcttcctgtacagcaagctgacagtcgacaagtccagatggcagcagggcaacgtgttcagttgcagcgtgatgcacgaggccctgcacaaccactacacccagaagtccctgagcctgtctcctgga

SEQ ID NO: 531 - protein, 724 aa, synthetic construct
  source 1..724: note = ahrCD19xahrCD20_Kcc hIgG1LALAPA peptide
DIQLTQSPSFLSASVGDRVTITCKASQSVDYSGDSYLNWYQQKPGKAPKLLIYDASNLVSGVPSRFSGSGSGTEFTLTISSLQPEDFATYYCQQSTENPWTFGGGTKLEIKGGSSGEIQLTQSPSSLSASVGDRVTITCRASSSVSYIHWFQQKPGSAPKSLIYATSNLASGVPSRFSGSGSGTDYTLTISSLQPEDFATYYCQQWTSNPPTFGGGTKLEIKGGGGSGGSGSGGGGSASGSGQVQLVQPGAEVKKPGASVKMSCKASGYTFTSYNMHWVRQAPGRGLEWMGAIYPGNGDTSYNQKFQGRVTLTADKSTSTAYMELSSLESEDTAVYYCARSTYYGGDWYFNVWGAGTTVTVSAGGSSGQVQLVQSGAEVKKPGSSVKVSCKASGYAFSSYWMNWVRQAPGQGLEWMGQIWPGDSDTNYAQKFQGRVTITADESTSTAYMELSSLRSEDTAVYYCARRETTTVGRYYYAMDYWGQGTTVTVSSASGGSGDKTHTCPPCPAPEAAGGPSVFLFPPKPKDTLMISRTPEVTCVVVDVSHEDPEVKFNWYVDGVEVHNAKTKPREEQYNSTYRVVSVLTVLHQDWLNGKEYKCKVSNKALAAPIEKTISKAKGQPREPQVYTLPPCRDELTKNQVSLWCLVKGFYPSDIAVEWESNGQPENNYKTTPPVLDSDGSFFLYSKLTVDKSRWQQGNVFSCSVMHEALHNHYTQKSLSLSPG

SEQ ID NO: 532 - DNA, 2172 bp, synthetic construct
  source 1..2172: mol_type = other DNA; note = ahrCD19xahrCD20_Kcc hIgG1LALAPA - DNA
gacatccagctgacccagtctccaagctttctgagcgccagcgtgggcgacagagtgaccatcacatgtaaagccagccagagcgtggactacagcggcgacagctacctgaactggtatcagcagaagcccggcaaggcccctaagctgctgatctacgacgcctccaatctggtgtccggcgtgcccagcagattttctggctctggaagcggcaccgagttcaccctgaccatatctagcctgcagcctgaggacttcgccacctactactgccagcagagcacagagaacccctggacatttggcggcggaacaaagctggaaatcaagggcggatcttctggagagatccagctgacacagagcccttctagcctgtctgccagcgtgggcgacagagtgaccatcacatgtagagccagcagcagcgtgtcctatatccactggttccagcagaagcctggaagcgcccctaagtccctgatctatgccacaagcaacctggcctctggcgtgcccagcagattttctggcagcggctctggcaccgactacaccctgacaatcagctccctgcagcctgaggacttcgccacctactactgccagcagtggacaagcaaccctcctacatttggcggaggcaccaagctggaaatcaagggaggcggaggatctggcggatctggaagtggcggcggtggatctgcttctggctctggccaggttcagctggttcagcctggcgccgaagtgaaaaaacctggcgcctccgtgaagatgagctgcaaggccagcggctacaccttcaccagctacaacatgcactgggtccgacaggcccctggcagaggacttgaatggatgggcgccatctatcccggcaacggcgatacaagctacaaccagaaattccagggcagagtgaccctgaccgccgacaagagcacaagcaccgcctacatggaactgagcagcctggaaagcgaggacaccgccgtgtactactgtgccagaagcacctactacggcggcgactggtacttcaatgtgtggggagccggcaccaccgtgacagtttctgctggaggcagctctggccaggttcagctggttcagtctggcgccgaagtgaagaaacctggcagcagcgtgaaggtgtcctgcaaggcctctggctacgccttcagcagctactggatgaactgggtccgacaggcccctggacaaggcttggaatggatgggccaaatctggcctggcgacagcgacaccaattacgcccagaaattccagggcagagtgaccatcaccgccgacgagtctacaagcaccgcctacatggaactgagcagcctgagaagcgaggacaccgccgtgtactactgtgccagacgggaaaccaccaccgtgggcagatattactacgccatggactactggggccagggcaccacagtgacagtctcttctgcttctggcggctccggagataagacccacacatgtcctccatgtcctgctccagaagctgctggcggcccttctgtgttcctgtttcctccaaagcctaaggacaccctgatgatcagcagaacccctgaagtgacctgcgtggtggtggatgtgtctcacgaggaccccgaagtgaagttcaattggtacgtggacggcgtggaagtgcacaacgccaagaccaagcctagagaggaacagtacaacagcacctacagagtggtgtccgtgctgaccgtgctgcaccaggattggctgaacggcaaagagtacaagtgcaaggtgtccaacaaggccctggccgctcctatcgagaaaaccatcagcaaggccaagggccagcctagggaaccccaggtttacacccttcctccatgccgggatgagctgaccaagaaccaggtgtccctgtggtgtctcgtgaagggcttctaccccagcgacattgccgtggaatgggagagcaatggccagcctgagaacaactacaagacaacccctcctgtgctggacagcgacggctcattcttcctgtacagcaagctgacagtcgacaagtccagatggcagcagggcaacgtgttcagttgcagcgtgatgcacgaggccctgcacaaccactacacccagaagtccctgagcctgtctcctgga

SEQ ID NO: 533 - protein, 724 aa, synthetic construct
  source 1..724: note = ahCD20_V22xahrCD19Kcc hIgG1LALAPA peptide
EIQLTQSPSSLSASVGDRVTITCRASSSVSYIHWFQQKPGSAPKSLIYATSNLSSGVPSRFSGSGSGTDYTLTISSLQPEDFATYYCQQWTSNPPTFGGGTKLEIKGGSSGDIQLTQSPSFLSASVGDRVTITCKASQSVDYSGDSYLNWYQQKPGKAPKLLIYDASNLVSGVPSRFSGSGSGTEFTLTISSLQPEDFATYYCQQSTENPWTFGGGTKLEIKGGGGSGGSGSGGGGSASGSGQVQLVQSGAEVKKPGSSVKVSCKASGYAFSSYWMNWVRQAPGQGLEWMGQIWPGDSDTNYAQKFQGRVTITADESTSTAYMELSSLRSEDTAVYYCARRETTTVGRYYYAMDYWGQGTTVTVSSGGSSGQVQLVQPGAEVKKPGASVKMSCKASGYTFTSYNMHWVRQAPGRGLEWMGAIYPGNGDTSYNQKFQGRVTLTADKSTSTAYMELSSLESEDTAVYYCARSTYYGGDWYFNVWGAGTTVTVSAASGGSGDKTHTCPPCPAPEAAGGPSVFLFPPKPKDTLMISRTPEVTCVVVDVSHEDPEVKFNWYVDGVEVHNAKTKPREEQYNSTYRVVSVLTVLHQDWLNGKEYKCKVSNKALAAPIEKTISKAKGQPREPQVYTLPPCRDELTKNQVSLWCLVKGFYPSDIAVEWESNGQPENNYKTTPPVLDSDGSFFLYSKLTVDKSRWQQGNVFSCSVMHEALHNHYTQKSLSLSPG

SEQ ID NO: 534 - DNA, 2172 bp, synthetic construct
  source 1..2172: mol_type = other DNA; note = ahCD20_V22xahrCD19Kcc hIgG1LALAPA - DNA
gagatccagctgacacagagcccttctagcctgtctgccagcgtgggcgacagagtgaccatcacatgtagagccagcagcagcgtgtcctatatccactggttccagcagaagcctggaagcgcccctaagtccctgatctatgccacaagcaacctgagctctggcgtgcccagcagattttctggcagcggctctggcaccgactacaccctgacaatcagctccctgcagcctgaggacttcgccacctactactgccagcagtggacaagcaaccctcctacatttggcggaggcaccaagctggaaatcaagggcggatcttctggagacatccagctgacccagtctccaagctttctgagcgccagcgtgggcgacagagtgaccatcacatgtaaagccagccagagcgtggactacagcggcgacagctacctgaactggtatcagcagaagcccggcaaggcccctaagctgctgatctacgacgcctccaatctggtgtccggcgtgcccagcagattttctggctctggaagcggcaccgagttcaccctgaccatatctagcctgcagcctgaggacttcgccacctactactgccagcagagcacagagaacccctggacatttggcggcggaacaaagctggaaatcaagggaggcggaggatctggcggatctggaagtggcggcggtggatctgcttctggctctggccaggttcagctggttcagtctggcgccgaagtgaagaaacctggcagcagcgtgaaggtgtcctgcaaggcctctggctacgccttcagcagctactggatgaactgggtccgacaggcccctggacaaggcttggaatggatgggccaaatctggcctggcgacagcgacaccaattacgcccagaaattccagggcagagtgaccatcaccgccgacgagtctacaagcaccgcctacatggaactgagcagcctgagaagcgaggacaccgccgtgtactactgtgccagacgggaaaccaccaccgtgggcagatattactacgccatggactactggggccagggcaccacagtgacagtctcttctggaggcagctctggccaggttcagctggttcagcctggcgccgaagtgaaaaaacctggcgcctccgtgaagatgagctgcaaggccagcggctacaccttcaccagctacaacatgcactgggtccgacaggcccctggcagaggacttgaatggatgggcgccatctatcccggcaacggcgatacaagctacaaccagaaattccagggcagagtgaccctgaccgccgacaagagcacaagcaccgcctacatggaactgagcagcctggaaagcgaggacaccgccgtgtactactgtgccagaagcacctactacggcggcgactggtacttcaatgtgtggggagccggcaccaccgtgacagtttctgctgcttctggcggctccggagataagacccacacatgtcctccatgtcctgctccagaagctgctggcggcccttctgtgttcctgtttcctccaaagcctaaggacaccctgatgatcagcagaacccctgaagtgacctgcgtggtggtggatgtgtctcacgaggaccccgaagtgaagttcaattggtacgtggacggcgtggaagtgcacaacgccaagaccaagcctagagaggaacagtacaacagcacctacagagtggtgtccgtgctgaccgtgctgcaccaggattggctgaacggcaaagagtacaagtgcaaggtgtccaacaaggccctggccgctcctatcgagaaaaccatcagcaaggccaagggccagcctagggaaccccaggtttacacccttcctccatgccgggatgagctgaccaagaaccaggtgtccctgtggtgtctcgtgaagggcttctaccccagcgacattgccgtggaatgggagagcaatggccagcctgagaacaactacaagacaacccctcctgtgctggacagcgacggctcattcttcctgtacagcaagctgacagtcgacaagtccagatggcagcagggcaacgtgttcagttgcagcgtgatgcacgaggccctgcacaaccactacacccagaagtccctgagcctgtctcctgga

SEQ ID NO: 535 - protein, 106 aa, synthetic construct
  source 1..106: note = ahCD20_V22 VL
EIQLTQSPSSLSASVGDRVTITCRASSSVSYIHWFQQKPGSAPKSLIYATSNLSSGVPSRFSGSGSGTDYTLTISSLQPEDFATYYCQQWTSNPPTFGGGTKLEIK

SEQ ID NO: 536 - protein, 10 aa, synthetic construct
  source 1..10: note = ahCD20_V22 LCDR1
RASSSVSYIH

SEQ ID NO: 537 - protein, 7 aa, synthetic construct
  source 1..7: note = ahCD20_V22 LCDR2
ATSNLSS

SEQ ID NO: 538 - protein, 9 aa, synthetic construct
  source 1..9: note = ahCD20_V22 LCDR3
QQWTSNPPT

SEQ ID NO: 539 - protein, 121 aa, synthetic construct; identical to SEQ ID NO: 110
  source 1..121: note = ahCD20_V22 VH

SEQ ID NO: 540 - protein, 7 aa, synthetic construct
  source 1..7: note = ahCD20_V22 HCDR1
GYTFTSY

SEQ ID NO: 541 - protein, 6 aa, synthetic construct
  source 1..6: note = ahCD20_V22 HCDR2
YPGNGD

SEQ ID NO: 542 - protein, 12 aa, synthetic construct
  source 1..12: note = ahCD20_V22 HCDR3
STYYGGDWYFNV

SEQ ID NO: 543 - protein, 255 aa, synthetic construct
  source 1..255: note = CD19 VL
DIQLTQSPSFLSASVGDRVTITCKASQSVDYSGDSYLNWYQQKPGKAPKLLIYDASNLVSGVPSRFSGSGSGTEFTLTISSLQPEDFATYYCQQSTENPWTFGGGTKLEIKGGGGSGGSGSGGGGSASGSGQVQLVQSGAEVKKPGSSVKVSCKASGYAFSSYWMNWVRQAPGQGLEWMGQIWPGDSDTNYAQKFQGRVTITADESTSTAYMELSSLRSEDTAVYYCARRETTTVGRYYYAMDYWGQGTTVTVSS

SEQ ID NO: 544 - protein, 124 aa, synthetic construct; identical to SEQ ID NO: 126
  source 1..124: note = CD19 VH

SEQ ID NO: 545 - protein, 724 aa, synthetic construct
  source 1..724: note = ahCD20V23xahrCD19_Kcc hIgG1LALAPA peptide
EIQLTQSPSSLSASVGDRVTITCRASSSVSYIHWFQQKPGSAPKSLIYATSNLTSGVPSRFSGSGSGTDYTLTISSLQPEDFATYYCQQWTSNPPTFGGGTKLEIKGGSSGDIQLTQSPSFLSASVGDRVTITCKASQSVDYSGDSYLNWYQQKPGKAPKLLIYDASNLVSGVPSRFSGSGSGTEFTLTISSLQPEDFATYYCQQSTENPWTFGGGTKLEIKGGGGSGGSGSGGGGSASGSGQVQLVQSGAEVKKPGSSVKVSCKASGYAFSSYWMNWVRQAPGQGLEWMGQIWPGDSDTNYAQKFQGRVTITADESTSTAYMELSSLRSEDTAVYYCARRETTTVGRYYYAMDYWGQGTTVTVSSGGSSGQVQLVQPGAEVKKPGASVKMSCKASGYTFTSYNMHWVRQAPGRGLEWMGAIYPGNGDTSYNQKFQGRVTLTADKSTSTAYMELSSLESEDTAVYYCARSTYYGGDWYFNVWGAGTTVTVSAASGGSGDKTHTCPPCPAPEAAGGPSVFLFPPKPKDTLMISRTPEVTCVVVDVSHEDPEVKFNWYVDGVEVHNAKTKPREEQYNSTYRVVSVLTVLHQDWLNGKEYKCKVSNKALAAPIEKTISKAKGQPREPQVYTLPPCRDELTKNQVSLWCLVKGFYPSDIAVEWESNGQPENNYKTTPPVLDSDGSFFLYSKLTVDKSRWQQGNVFSCSVMHEALHNHYTQKSLSLSPG

SEQ ID NO: 546 - DNA, 2172 bp, synthetic construct
  source 1..2172: mol_type = other DNA; note = ahCD20V23xahrCD19_Kcc hIgG1LALAPA - DNA
gagatccagctgacacagagcccttctagcctgtctgccagcgtgggcgacagagtgaccatcacatgtagagccagcagcagcgtgtcctatatccactggttccagcagaagcctggaagcgcccctaagtccctgatctatgccacaagcaacctgacctctggcgtgcccagcagattttctggcagcggctctggcaccgactacaccctgacaatcagctccctgcagcctgaggacttcgccacctactactgccagcagtggacaagcaaccctcctacatttggcggaggcaccaagctggaaatcaagggcggatcttctggagacatccagctgacccagtctccaagctttctgagcgccagcgtgggcgacagagtgaccatcacatgtaaagccagccagagcgtggactacagcggcgacagctacctgaactggtatcagcagaagcccggcaaggcccctaagctgctgatctacgacgcctccaatctggtgtccggcgtgcccagcagattttctggctctggaagcggcaccgagttcaccctgaccatatctagcctgcagcctgaggacttcgccacctactactgccagcagagcacagagaacccctggacatttggcggcggaacaaagctggaaatcaagggaggcggaggatctggcggatctggaagtggcggcggtggatctgcttctggctctggccaggttcagctggttcagtctggcgccgaagtgaagaaacctggcagcagcgtgaaggtgtcctgcaaggcctctggctacgccttcagcagctactggatgaactgggtccgacaggcccctggacaaggcttggaatggatgggccaaatctggcctggcgacagcgacaccaattacgcccagaaattccagggcagagtgaccatcaccgccgacgagtctacaagcaccgcctacatggaactgagcagcctgagaagcgaggacaccgccgtgtactactgtgccagacgggaaaccaccaccgtgggcagatattactacgccatggactactggggccagggcaccacagtgacagtctcttctggaggcagctctggccaggttcagctggttcagcctggcgccgaagtgaaaaaacctggcgcctccgtgaagatgagctgcaaggccagcggctacaccttcaccagctacaacatgcactgggtccgacaggcccctggcagaggacttgaatggatgggcgccatctatcccggcaacggcgatacaagctacaaccagaaattccagggcagagtgaccctgaccgccgacaagagcacaagcaccgcctacatggaactgagcagcctggaaagcgaggacaccgccgtgtactactgtgccagaagcacctactacggcggcgactggtacttcaatgtgtggggagccggcaccaccgtgacagtttctgctgcttctggcggctccggagataagacccacacatgtcctccatgtcctgctccagaagctgctggcggcccttctgtgttcctgtttcctccaaagcctaaggacaccctgatgatcagcagaacccctgaagtgacctgcgtggtggtggatgtgtctcacgaggaccccgaagtgaagttcaattggtacgtggacggcgtggaagtgcacaacgccaagaccaagcctagagaggaacagtacaacagcacctacagagtggtgtccgtgctgaccgtgctgcaccaggattggctgaacggcaaagagtacaagtgcaaggtgtccaacaaggccctggccgctcctatcgagaaaaccatcagcaaggccaagggccagcctagggaaccccaggtttacacccttcctccatgccgggatgagctgaccaagaaccaggtgtccctgtggtgtctcgtgaagggcttctaccccagcgacattgccgtggaatgggagagcaatggccagcctgagaacaactacaagacaacccctcctgtgctggacagcgacggctcattcttcctgtacagcaagctgacagtcgacaagtccagatggcagcagggcaacgtgttcagttgcagcgtgatgcacgaggccctgcacaaccactacacccagaagtccctgagcctgtctcctgga

SEQ ID NO: 547 - protein, 106 aa, synthetic construct
  source 1..106: note = ahCD20V23 VL
EIQLTQSPSSLSASVGDRVTITCRASSSVSYIHWFQQKPGSAPKSLIYATSNLTSGVPSRFSGSGSGTDYTLTISSLQPEDFATYYCQQWTSNPPTFGGGTKLEIK

SEQ ID NO: 548 - protein, 10 aa, synthetic construct
  source 1..10: note = ahCD20V23 LCDR1
RASSSVSYIH

SEQ ID NO: 549 - protein, 7 aa, synthetic construct
  source 1..7: note = ahCD20V23 LCDR2
ATSNLTS

SEQ ID NO: 550 - protein, 9 aa, synthetic construct
  source 1..9: note = ahCD20V23 LCDR3
QQWTSNPPT

SEQ ID NO: 551 - protein, 121 aa, synthetic construct; identical to SEQ ID NO: 110
  source 1..121: note = ahCD20V23 VH

SEQ ID NO: 552 - protein, 7 aa, synthetic construct
  source 1..7: note = ahCD20V23 HCDR1
GYTFTSY

SEQ ID NO: 553 - protein, 5 aa, synthetic construct
  source 1..5: note = ahCD20V23 HCDR2
PGNGD

SEQ ID NO: 554 - protein, 12 aa, synthetic construct
  source 1..12: note = ahCD20V23 HCDR3
STYYGGDWYFNV

SEQ ID NO: 555 - protein, 111 aa, synthetic construct; identical to SEQ ID NO: 127
  source 1..111: note = CD19 VL

SEQ ID NO: 556 - protein, 124 aa, synthetic construct; identical to SEQ ID NO: 126
  source 1..124: note = CD19 VH

SEQ ID NO: 557 - protein, 724 aa, synthetic construct
  source 1..724: note = ahrCD19xahCD20_V22 Kcc hIgG1LALAPA peptide
DIQLTQSPSFLSASVGDRVTITCKASQSVDYSGDSYLNWYQQKPGKAPKLLIYDASNLVSGVPSRFSGSGSGTEFTLTISSLQPEDFATYYCQQSTENPWTFGGGTKLEIKGGSSGEIQLTQSPSSLSASVGDRVTITCRASSSVSYIHWFQQKPGSAPKSLIYATSNLSSGVPSRFSGSGSGTDYTLTISSLQPEDFATYYCQQWTSNPPTFGGGTKLEIKGGGGSGGSGSGGGGSASGSGQVQLVQPGAEVKKPGASVKMSCKASGYTFTSYNMHWVRQAPGRGLEWMGAIYPGNGDTSYNQKFQGRVTLTADKSTSTAYMELSSLESEDTAVYYCARSTYYGGDWYFNVWGAGTTVTVSAGGSSGQVQLVQSGAEVKKPGSSVKVSCKASGYAFSSYWMNWVRQAPGQGLEWMGQIWPGDSDTNYAQKFQGRVTITADESTSTAYMELSSLRSEDTAVYYCARRETTTVGRYYYAMDYWGQGTTVTVSSASGGSGDKTHTCPPCPAPEAAGGPSVFLFPPKPKDTLMISRTPEVTCVVVDVSHEDPEVKFNWYVDGVEVHNAKTKPREEQYNSTYRVVSVLTVLHQDWLNGKEYKCKVSNKALAAPIEKTISKAKGQPREPQVYTLPPCRDELTKNQVSLWCLVKGFYPSDIAVEWESNGQPENNYKTTPPVLDSDGSFFLYSKLTVDKSRWQQGNVFSCSVMHEALHNHYTQKSLSLSPG

SEQ ID NO: 558 - DNA, 2172 bp, synthetic construct
  source 1..2172: mol_type = other DNA; note = ahrCD19xahCD20_V22 Kcc hIgG1LALAPA - DNA
gacatccagctgacccagtctccaagctttctgagcgccagcgtgggcgacagagtgaccatcacatgtaaagccagccagagcgtggactacagcggcgacagctacctgaactggtatcagcagaagcccggcaaggcccctaagctgctgatctacgacgcctccaatctggtgtccggcgtgcccagcagattttctggctctggaagcggcaccgagttcaccctgaccatatctagcctgcagcctgaggacttcgccacctactactgccagcagagcacagagaacccctggacatttggcggcggaacaaagctggaaatcaagggcggatcttctggagagatccagctgacacagagcccttctagcctgtctgccagcgtgggcgacagagtgaccatcacatgtagagccagcagcagcgtgtcctatatccactggttccagcagaagcctggaagcgcccctaagtccctgatctatgccacaagcaacctgagctctggcgtgcccagcagattttctggcagcggctctggcaccgactacaccctgacaatcagctccctgcagcctgaggacttcgccacctactactgccagcagtggacaagcaaccctcctacatttggcggaggcaccaagctggaaatcaagggaggcggaggatctggcggatctggaagtggcggcggtggatctgcttctggctctggccaggttcagctggttcagcctggcgccgaagtgaaaaaacctggcgcctccgtgaagatgagctgcaaggccagcggctacaccttcaccagctacaacatgcactgggtccgacaggcccctggcagaggacttgaatggatgggcgccatctatcccggcaacggcgatacaagctacaaccagaaattccagggcagagtgaccctgaccgccgacaagagcacaagcaccgcctacatggaactgagcagcctggaaagcgaggacaccgccgtgtactactgtgccagaagcacctactacggcggcgactggtacttcaatgtgtggggagccggcaccaccgtgacagtttctgctggaggcagctctggccaggttcagctggttcagtctggcgccgaagtgaagaaacctggcagcagcgtgaaggtgtcctgcaaggcctctggctacgccttcagcagctactggatgaactgggtccgacaggcccctggacaaggcttggaatggatgggccaaatctggcctggcgacagcgacaccaattacgcccagaaattccagggcagagtgaccatcaccgccgacgagtctacaagcaccgcctacatggaactgagcagcctgagaagcgaggacaccgccgtgtactactgtgccagacgggaaaccaccaccgtgggcagatattactacgccatggactactggggccagggcaccacagtgacagtctcttctgcttctggcggctccggagataagacccacacatgtcctccatgtcctgctccagaagctgctggcggcccttctgtgttcctgtttcctccaaagcctaaggacaccctgatgatcagcagaacccctgaagtgacctgcgtggtggtggatgtgtctcacgaggaccccgaagtgaagttcaattggtacgtggacggcgtggaagtgcacaacgccaagaccaagcctagagaggaacagtacaacagcacctacagagtggtgtccgtgctgaccgtgctgcaccaggattggctgaacggcaaagagtacaagtgcaaggtgtccaacaaggccctggccgctcctatcgagaaaaccatcagcaaggccaagggccagcctagggaaccccaggtttacacccttcctccatgccgggatgagctgaccaagaaccaggtgtccctgtggtgtctcgtgaagggcttctaccccagcgacattgccgtggaatgggagagcaatggccagcctgagaacaactacaagacaacccctcctgtgctggacagcgacggctcattcttcctgtacagcaagctgacagtcgacaagtccagatggcagcagggcaacgtgttcagttgcagcgtgatgcacgaggccctgcacaaccactacacccagaagtccctgagcctgtctcctgga

SEQ ID NO: 559 - protein, 724 aa, synthetic construct
  source 1..724: note = ahrCD19xahCD20_V23 Kcc hIgG1LALAPA peptide
DIQLTQSPSFLSASVGDRVTITCKASQSVDYSGDSYLNWYQQKPGKAPKLLIYDASNLVSGVPSRFSGSGSGTEFTLTISSLQPEDFATYYCQQSTENPWTFGGGTKLEIKGGSSGEIQLTQSPSSLSASVGDRVTITCRASSSVSYIHWFQQKPGSAPKSLIYATSNLTSGVPSRFSGSGSGTDYTLTISSLQPEDFATYYCQQWTSNPPTFGGGTKLEIKGGGGSGGSGSGGGGSASGSGQVQLVQPGAEVKKPGASVKMSCKASGYTFTSYNMHWVRQAPGRGLEWMGAIYPGNGDTSYNQKFQGRVTLTADKSTSTAYMELSSLESEDTAVYYCARSTYYGGDWYFNVWGAGTTVTVSAGGSSGQVQLVQSGAEVKKPGSSVKVSCKASGYAFSSYWMNWVRQAPGQGLEWMGQIWPGDSDTNYAQKFQGRVTITADESTSTAYMELSSLRSEDTAVYYCARRETTTVGRYYYAMDYWGQGTTVTVSSASGGSGDKTHTCPPCPAPEAAGGPSVFLFPPKPKDTLMISRTPEVTCVVVDVSHEDPEVKFNWYVDGVEVHNAKTKPREEQYNSTYRVVSVLTVLHQDWLNGKEYKCKVSNKALAAPIEKTISKAKGQPREPQVYTLPPCRDELTKNQVSLWCLVKGFYPSDIAVEWESNGQPENNYKTTPPVLDSDGSFFLYSKLTVDKSRWQQGNVFSCSVMHEALHNHYTQKSLSLSPG

SEQ ID NO: 560 - DNA, 2172 bp, synthetic construct
  source 1..2172: mol_type = other DNA; note = ahrCD19xahCD20_V23 Kcc hIgG1LALAPA - DNA
gacatccagctgacccagtctccaagctttctgagcgccagcgtgggcgacagagtgaccatcacatgtaaagccagccagagcgtggactacagcggcgacagctacctgaactggtatcagcagaagcccggcaaggcccctaagctgctgatctacgacgcctccaatctggtgtccggcgtgcccagcagattttctggctctggaagcggcaccgagttcaccctgaccatatctagcctgcagcctgaggacttcgccacctactactgccagcagagcacagagaacccctggacatttggcggcggaacaaagctggaaatcaagggcggatcttctggagagatccagctgacacagagcccttctagcctgtctgccagcgtgggcgacagagtgaccatcacatgtagagccagcagcagcgtgtcctatatccactggttccagcagaagcctggaagcgcccctaagtccctgatctatgccacaagcaacctgacctctggcgtgcccagcagattttctggcagcggctctggcaccgactacaccctgacaatcagctccctgcagcctgaggacttcgccacctactactgccagcagtggacaagcaaccctcctacatttggcggaggcaccaagctggaaatcaagggaggcggaggatctggcggatctggaagtggcggcggtggatctgcttctggctctggccaggttcagctggttcagcctggcgccgaagtgaaaaaacctggcgcctccgtgaagatgagctgcaaggccagcggctacaccttcaccagctacaacatgcactgggtccgacaggcccctggcagaggacttgaatggatgggcgccatctatcccggcaacggcgatacaagctacaaccagaaattccagggcagagtgaccctgaccgccgacaagagcacaagcaccgcctacatggaactgagcagcctggaaagcgaggacaccgccgtgtactactgtgccagaagcacctactacggcggcgactggtacttcaatgtgtggggagccggcaccaccgtgacagtttctgctggaggcagctctggccaggttcagctggttcagtctggcgccgaagtgaagaaacctggcagcagcgtgaaggtgtcctgcaaggcctctggctacgccttcagcagctactggatgaactgggtccgacaggcccctggacaaggcttggaatggatgggccaaatctggcctggcgacagcgacaccaattacgcccagaaattccagggcagagtgaccatcaccgccgacgagtctacaagcaccgcctacatggaactgagcagcctgagaagcgaggacaccgccgtgtactactgtgccagacgggaaaccaccaccgtgggcagatattactacgccatggactactggggccagggcaccacagtgacagtctcttctgcttctggcggctccggagataagacccacacatgtcctccatgtcctgctccagaagctgctggcggcccttctgtgttcctgtttcctccaaagcctaaggacaccctgatgatcagcagaacccctgaagtgacctgcgtggtggtggatgtgtctcacgaggaccccgaagtgaagttcaattggtacgtggacggcgtggaagtgcacaacgccaagaccaagcctagagaggaacagtacaacagcacctacagagtggtgtccgtgctgaccgtgctgcaccaggattggctgaacggcaaagagtacaagtgcaaggtgtccaacaaggccctggccgctcctatcgagaaaaccatcagcaaggccaagggccagcctagggaaccccaggtttacacccttcctccatgccgggatgagctgaccaagaaccaggtgtccctgtggtgtctcgtgaagggcttctaccccagcgacattgccgtggaatgggagagcaatggccagcctgagaacaactacaagacaacccctcctgtgctggacagcgacggctcattcttcctgtacagcaagctgacagtcgacaagtccagatggcagcagggcaacgtgttcagttgcagcgtgatgcacgaggccctgcacaaccactacacccagaagtccctgagcctgtctcctgga

SEQ ID NO: 561 - protein, 726 aa, synthetic construct
  source 1..726: note = ahCD20_ofxahCD19 Kcc hIgG1LALAPA peptide
EIVLTQSPATLSLSPGERATLSCRASQSVSSYLAWYQQKPGQAPRLLIYDASNRATGIPARFSGSGSGTDFTLTISSLEPEDFAVYYCQQRSNWPITFGQGTRLEIKGGSSGDIQLTQSPSFLSASVGDRVTITCKASQSVDYSGDSYLNWYQQKPGKAPKLLIYDASNLVSGVPSRFSGSGSGTEFTLTISSLQPEDFATYYCQQSTENPWTFGGGTKLEIKGGGGSGGSGSGGGGSASGSGQVQLVQSGAEVKKPGSSVKVSCKASGYAFSSYWMNWVRQAPGQGLEWMGQIWPGDSDTNYAQKFQGRVTITADESTSTAYMELSSLRSEDTAVYYCARRETTTVGRYYYAMDYWGQGTTVTVSSGGSSGEVQLVESGGGLVQPGRSLRLSCAASGFTFNDYAMHWVRQAPGKGLEWVSTISWNSGSIGYADSVKGRFTISRDNAKKSLYLQMNSLRAEDTALYYCAKDIQYGNYYYGMDVWGQGTTVTVSSASGGSGDKTHTCPPCPAPEAAGGPSVFLFPPKPKDTLMISRTPEVTCVVVDVSHEDPEVKFNWYVDGVEVHNAKTKPREEQYNSTYRVVSVLTVLHQDWLNGKEYKCKVSNKALAAPIEKTISKAKGQPREPQVYTLPPCRDELTKNQVSLWCLVKGFYPSDIAVEWESNGQPENNYKTTPPVLDSDGSFFLYSKLTVDKSRWQQGNVFSCSVMHEALHNHYTQKSLSLSPG

SEQ ID NO: 562 - DNA, 2178 bp, synthetic construct
  source 1..2178: mol_type = other DNA; note = ahCD20_ofxahCD19 Kcc hIgG1LALAPA - DNA
gagatcgtgctgacacagtctcccgccacactgtcactgtctccaggcgaaagagccacactgagctgtagagccagccagagcgtgtcctcttacctggcctggtatcagcagaagcctggacaggctccccggctgctgatctacgatgccagcaatagagccacaggcatccccgccagattttctggctctggcagcggcaccgatttcaccctgaccataagcagcctggaacctgaggacttcgccgtgtactactgccagcagagaagcaactggcccatcacctttggccagggcaccagactggaaatcaagggcggatcttctggagacatccagctgacccagtctccaagctttctgagcgccagcgtgggcgacagagtgaccatcacatgtaaagccagccagagcgtggactacagcggcgacagctacctgaactggtatcagcagaagcccggcaaggcccctaagctgctgatctacgacgcctccaatctggtgtccggcgtgcccagcagattttctggctctggaagcggcaccgagttcaccctgaccatatctagcctgcagcctgaggacttcgccacctactactgccagcagagcacagagaacccctggacatttggcggcggaacaaagctggaaatcaagggaggcggaggatctggcggatctggaagtggcggcggtggatctgcttctggctctggccaggttcagctggttcagtctggcgccgaagtgaagaaacctggcagcagcgtgaaggtgtcctgcaaggcctctggctacgccttcagcagctactggatgaactgggtccgacaggcccctggacaaggcttggaatggatgggccaaatctggcctggcgacagcgacaccaattacgcccagaaattccagggcagagtgaccatcaccgccgacgagtctacaagcaccgcctacatggaactgagcagcctgagaagcgaggacaccgccgtgtactactgtgccagacgggaaaccaccaccgtgggcagatattactacgccatggactactggggccagggcaccacagtgacagtctcttctggaggcagctctggcgaggtgcagctggttgaatctggcggaggactggtgcagcctggcagaagtctgagactgtcttgtgccgccagcggcttcaccttcaacgactatgccatgcactgggtccgacaggcccctggcaaaggacttgaatgggtgtccaccatcagctggaacagcggctctatcggctacgccgattccgtgaagggcagattcaccatctccagagacaacgccaagaagtccctgtacctgcagatgaacagcctgagagccgaggacacagccctgtactactgcgccaaggacatccagtacggcaactactactacggcatggacgtgtggggccagggcacaacagtgacagtctcttctgcttctggcggctccggagataagacccacacatgtcctccatgtcctgctccagaagctgctggcggcccttctgtgttcctgtttcctccaaagcctaaggacaccctgatgatcagcagaacccctgaagtgacctgcgtggtggtggatgtgtctcacgaggaccccgaagtgaagttcaattggtacgtggacggcgtggaagtgcacaacgccaagaccaagcctagagaggaacagtacaacagcacctacagagtggtgtccgtgctgaccgtgctgcaccaggattggctgaacggcaaagagtacaagtgcaaggtgtccaacaaggccctggccgctcctatcgagaaaaccatcagcaaggccaagggccagcctagggaaccccaggtttacacccttcctccatgccgggatgagctgaccaagaaccaggtgtccctgtggtgtctcgtgaagggcttctaccccagcgacattgccgtggaatgggagagcaatggccagcctgagaacaactacaagacaacccctcctgtgctggacagcgacggctcattcttcctgtacagcaagctgacagtcgacaagtccagatggcagcagggcaacgtgttcagttgcagcgtgatgcacgaggccctgcacaaccactacacccagaagtccctgagcctgtctcctgga

SEQ ID NO: 563 - protein, 726 aa, synthetic construct
  source 1..726: note = ahrCD19xahCD20_of Kcc hIgG1LALAPA
DIQLTQSPSFLSASVGDRVTITCKASQSVDYSGDSYLNWYQQKPGKAPKLLIYDASNLVSGVPSRFSGSGSGTEFTLTISSLQPEDFATYYCQQSTENPWTFGGGTKLEIKGGSSGEIVLTQSPATLSLSPGERATLSCRASQSVSSYLAWYQQKPGQAPRLLIYDASNRATGIPARFSGSGSGTDFTLTISSLEPEDFAVYYCQQRSNWPITFGQGTRLEIKGGGGSGGSGSGGGGSASGSGEVQLVESGGGLVQPGRSLRLSCAASGFTFNDYAMHWVRQAPGKGLEWVSTISWNSGSIGYADSVKGRFTISRDNAKKSLYLQMNSLRAEDTALYYCAKDIQYGNYYYGMDVWGQGTTVTVSSGGSSGQVQLVQSGAEVKKPGSSVKVSCKASGYAFSSYWMNWVRQAPGQGLEWMGQIWPGDSDTNYAQKFQGRVTITADESTSTAYMELSSLRSEDTAVYYCARRETTTVGRYYYAMDYWGQGTTVTVSSASGGSGDKTHTCPPCPAPEAAGGPSVFLFPPKPKDTLMISRTPEVTCVVVDVSHEDPEVKFNWYVDGVEVHNAKTKPREEQYNSTYRVVSVLTVLHQDWLNGKEYKCKVSNKALAAPIEKTISKAKGQPREPQVYTLPPCRDELTKNQVSLWCLVKGFYPSDIAVEWESNGQPENNYKTTPPVLDSDGSFFLYSKLTVDKSRWQQGNVFSCSVMHEALHNHYTQKSLSLSPG

SEQ ID NO: 564 - DNA, 2178 bp, synthetic construct
  source 1..2178: mol_type = other DNA; note = ahrCD19xahCD20_of Kcc hIgG1LALAPA
gacatccagctgacccagtctccaagctttctgagcgccagcgtgggcgacagagtgaccatcacatgtaaagccagccagagcgtggactacagcggcgacagctacctgaactggtatcagcagaagcccggcaaggcccctaagctgctgatctacgacgcctccaatctggtgtccggcgtgcccagcagattttctggctctggaagcggcaccgagttcaccctgaccatatctagcctgcagcctgaggacttcgccacctactactgccagcagagcacagagaacccctggacatttggcggcggaacaaagctggaaatcaagggcggatcttctggagagatcgtgctgacacagtctcccgccacactgtcactgtctccaggcgaaagagccacactgagctgtagagccagccagagcgtgtcctcttacctggcctggtatcagcagaagcctggacaggctccccggctgctgatctacgatgccagcaatagagccacaggcatccccgccagattttctggctctggcagcggcaccgatttcaccctgaccataagcagcctggaacctgaggacttcgccgtgtactactgccagcagagaagcaactggcccatcacctttggccagggcaccagactggaaatcaagggaggcggaggatctggcggatctggaagtggcggcggtggatctgcttctggctctggcgaggtgcagctggttgaatctggcggaggactggtgcagcctggcagaagtctgagactgtcttgtgccgccagcggcttcaccttcaacgactatgccatgcactgggtccgacaggcccctggcaaaggacttgaatgggtgtccaccatcagctggaacagcggctctatcggctacgccgattccgtgaagggcagattcaccatctccagagacaacgccaagaagtccctgtacctgcagatgaacagcctgagagccgaggacacagccctgtactactgcgccaaggacatccagtacggcaactactactacggcatggacgtgtggggccagggcacaacagtgacagtctcttctggaggcagctctggccaggttcagctggttcagtctggcgccgaagtgaagaaacctggcagcagcgtgaaggtgtcctgcaaggcctctggctacgccttcagcagctactggatgaactgggtccgacaggcccctggacaaggcttggaatggatgggccaaatctggcctggcgacagcgacaccaattacgcccagaaattccagggcagagtgaccatcaccgccgacgagtctacaagcaccgcctacatggaactgagcagcctgagaagcgaggacaccgccgtgtactactgtgccagacgggaaaccaccaccgtgggcagatattactacgccatggactactggggccagggcaccacagtgacagtctcttctgcttctggcggctccggagataagacccacacatgtcctccatgtcctgctccagaagctgctggcggcccttctgtgttcctgtttcctccaaagcctaaggacaccctgatgatcagcagaacccctgaagtgacctgcgtggtggtggatgtgtctcacgaggaccccgaagtgaagttcaattggtacgtggacggcgtggaagtgcacaacgccaagaccaagcctagagaggaacagtacaacagcacctacagagtggtgtccgtgctgaccgtgctgcaccaggattggctgaacggcaaagagtacaagtgcaaggtgtccaacaaggccctggccgctcctatcgagaaaaccatcagcaaggccaagggccagcctagggaaccccaggtttacacccttcctccatgccgggatgagctgaccaagaaccaggtgtccctgtggtgtctcgtgaagggcttctaccccagcgacattgccgtggaatgggagagcaatggccagcctgagaacaactacaagacaacccctcctgtgctggacagcgacggctcattcttcctgtacagcaagctgacagtcgacaagtccagatggcagcagggcaacgtgttcagttgcagcgtgatgcacgaggccctgcacaaccactacacccagaagtccctgagcctgtctcctgga

SEQ ID NO: 565 - protein, 718 aa, synthetic construct
  source 1..718: note = ahcMetxahTrop2_h20 L5 Kcc hIgG1LALAPA peptide
DIVMTQSPDSLAVSLGERATINCKSSQSLLYTSSQKNYLAWYQQKPGQPPKLLIYWASTRESGVPDRFSGSGSGTDFTLTISSLQAEDVAVYYCQQYYAYPWTFGGGTKLEIKGGGGSDIQMTQSPSSLSASVGDRVTITCQASQDINKYLAWYQKKPGKAPKLLIHYTSNLQTGVPSRFSGSGSGTDFTFTISSLQPEDIATYYCLQYDDLFTFGQGTKLEIKGGGGSGGSGSGGGGSASGSGQVQLVQSGAEVKKPGASVKVSCKASGSSFTGYTMNWVKQAPGQGLEWIGIINPYQGDTTYNQKFQGKVTITVDKSTSTVYMELSSLRSEDTAVYYCARGAGLYYFDYWGQGTTVTVSSGGGGSQVQLVQSGAEVVKPGASVKLSCKASGYTFTSYWLHWVRQAPGQGLEWVGMIDPSNSDTRFNPNFKDRVTITADTSTSTAYMELSSLRSEDTAVYYCATYKSYVSPLDYWGQGTSVTVSSASGGSGDKTHTCPPCPAPEAAGGPSVFLFPPKPKDTLMISRTPEVTCVVVDVSHEDPEVKFNWYVDGVEVHNAKTKPREEQYNSTYRVVSVLTVLHQDWLNGKEYKCKVSNKALAAPIEKTISKAKGQPREPQVYTLPPCRDELTKNQVSLWCLVKGFYPSDIAVEWESNGQPENNYKTTPPVLDSDGSFFLYSKLTVDKSRWQQGNVFSCSVMHEALHNHYTQKSLSLSPG

SEQ ID NO: 566 - DNA, 2154 bp, synthetic construct
  source 1..2154: mol_type = other DNA; note = ahcMetxahTrop2_h20 L5 Kcc hIgG1LALAPA - DNA
gacatcgtgatgacacagagccctgatagcctggccgtgtctctgggagagagagccaccatcaactgcaagagcagccagagcctgctgtacacctccagccagaagaactacctggcctggtatcagcagaagcccggccagcctcctaagctgctgatctactgggccagcaccagagaaagcggcgtgcccgatagattttctggctctggcagcggcaccgacttcaccctgacaatttctagcctgcaagccgaggacgtggccgtgtactactgccagcagtactacgcttacccctggacctttggcggaggcaccaagctggaaatcaagggaggcggtggatctgacatccagatgacacagagccctagcagcctgtctgccagcgtgggagacagagtgaccattacctgtcaggccagccaggacatcaacaagtacctggcctggtatcagaagaagcccggcaaggctcctaagctgctgatccactacaccagcaacctgcagacaggcgtgcccagcagattttctggcagcggctctggcaccgacttcaccttcaccataagcagcctgcagcctgaggatatcgccacctactactgcctgcagtacgacgacctgttcacctttggccagggcaccaagctggaaatcaaaggaggcggaggatctggcggatctggaagtggcggcggtggatctgcttctggctctggccaggtgcagctggtgcagtctggcgccgaagttaagaaacctggcgcctccgtgaaggtgtcctgtaaagccagcggcagcagcttcaccggctacaccatgaactgggtcaagcaggctcctggacagggactcgagtggatcggcatcatcaacccctaccagggcgacaccacctacaaccagaagttccagggcaaagtcaccatcaccgtggacaagagcaccagcaccgtgtacatggaactgtccagcctgagaagcgaggacaccgccgtgtactactgtgctagaggcgccggactgtactacttcgactattggggccagggaaccaccgtgaccgttagctctggaggcggtggatctcaggttcagctggttcagtctggcgccgaggttgtgaaacctggcgcctctgtgaagctgagctgtaaagccagcggctacaccttcaccagctactggctgcactgggtccgacaggctccaggacaaggactggaatgggtcggaatgatcgaccccagcaacagcgacacccggttcaaccccaacttcaaggacagagtgaccatcaccgccgacaccagcacaagcaccgcctacatggaactgagcagcctgagaagcgaggacaccgccgtgtactactgcgccacctacaagagctacgtgtcccctctggattactggggccagggcacaagcgtgacagtgtcatctgctagtggcggctccggagataagacccacacatgtcctccatgtcctgctccagaagctgccggcggaccttccgtgtttctgttccctccaaagcctaaggacaccctgatgatcagcaggacccctgaagtgacctgcgtggtggtggatgtgtctcacgaggacccagaagtgaagttcaattggtacgtggacggcgtggaagtgcacaacgccaagaccaagcctagagaggaacagtacaacagcacctacagagtggtgtccgtgctgacagtgctgcaccaggattggctgaacggcaaagagtacaagtgcaaggtgtccaacaaggccctggctgcccctatcgagaaaaccatcagcaaggccaagggccagcctagggaaccccaggtttacacccttcctccatgccgggatgagctgaccaagaaccaggtgtccctgtggtgtctggtcaagggcttctaccccagcgacattgccgtggaatgggagagcaatggccagcctgagaacaactacaagaccacacctcctgtgctggactccgacggatcattcttcctgtacagcaagctgactgtggacaagagcagatggcagcagggcaacgtgttcagctgcagcgtgatgcacgaggccctgcacaaccactacacacagaagtccctgtctctgagccctggc

SEQ ID NO: 567 - protein, 5 aa, synthetic construct
  source 1..5: note = AA linker
GGGGS

SEQ ID NO: 568 - protein, 718 aa, synthetic construct
  source 1..718: note = ahTrop2_h20xahcMetL5 Kcc hIgG1LALAPA - peptide
DIQMTQSPSSLSASVGDRVTITCQASQDINKYLAWYQKKPGKAPKLLIHYTSNLQTGVPSRFSGSGSGTDFTFTISSLQPEDIATYYCLQYDDLFTFGQGTKLEIKGGGGSDIVMTQSPDSLAVSLGERATINCKSSQSLLYTSSQKNYLAWYQQKPGQPPKLLIYWASTRESGVPDRFSGSGSGTDFTLTISSLQAEDVAVYYCQQYYAYPWTFGGGTKLEIKGGGGSGGSGSGGGGSASGSGQVQLVQSGAEVVKPGASVKLSCKASGYTFTSYWLHWVRQAPGQGLEWVGMIDPSNSDTRFNPNFKDRVTITADTSTSTAYMELSSLRSEDTAVYYCATYKSYVSPLDYWGQGTSVTVSSGGGGSQVQLVQSGAEVKKPGASVKVSCKASGSSFTGYTMNWVKQAPGQGLEWIGIINPYQGDTTYNQKFQGKVTITVDKSTSTVYMELSSLRSEDTAVYYCARGAGLYYFDYWGQGTTVTVSSASGGSGDKTHTCPPCPAPEAAGGPSVFLFPPKPKDTLMISRTPEVTCVVVDVSHEDPEVKFNWYVDGVEVHNAKTKPREEQYNSTYRVVSVLTVLHQDWLNGKEYKCKVSNKALAAPIEKTISKAKGQPREPQVYTLPPCRDELTKNQVSLWCLVKGFYPSDIAVEWESNGQPENNYKTTPPVLDSDGSFFLYSKLTVDKSRWQQGNVFSCSVMHEALHNHYTQKSLSLSPG

SEQ ID NO: 569 - skipped

SEQ ID NO: 570 - protein, 718 aa, synthetic construct
  source 1..718: note = ahcMetxahTrop2_h20 L6 Kcc hIgG1LALAPA peptide
DIVMTQSPDSLAVSLGERATINCKSSQSLLYTSSQKNYLAWYQQKPGQPPKLLIYWASTRESGVPDRFSGSGSGTDFTLTISSLQAEDVAVYYCQQYYAYPWTFGGGTKLEIKASGGSDIQMTQSPSSLSASVGDRVTITCQASQDINKYLAWYQKKPGKAPKLLIHYTSNLQTGVPSRFSGSGSGTDFTFTISSLQPEDIATYYCLQYDDLFTFGQGTKLEIKGGGGSGGSGSGGGGSASGSGQVQLVQSGAEVKKPGASVKVSCKASGSSFTGYTMNWVKQAPGQGLEWIGIINPYQGDTTYNQKFQGKVTITVDKSTSTVYMELSSLRSEDTAVYYCARGAGLYYFDYWGQGTTVTVSSASGGSQVQLVQSGAEVVKPGASVKLSCKASGYTFTSYWLHWVRQAPGQGLEWVGMIDPSNSDTRFNPNFKDRVTITADTSTSTAYMELSSLRSEDTAVYYCATYKSYVSPLDYWGQGTSVTVSSASGGSGDKTHTCPPCPAPEAAGGPSVFLFPPKPKDTLMISRTPEVTCVVVDVSHEDPEVKFNWYVDGVEVHNAKTKPREEQYNSTYRVVSVLTVLHQDWLNGKEYKCKVSNKALAAPIEKTISKAKGQPREPQVYTLPPCRDELTKNQVSLWCLVKGFYPSDIAVEWESNGQPENNYKTTPPVLDSDGSFFLYSKLTVDKSRWQQGNVFSCSVMHEALHNHYTQKSLSLSPG

SEQ ID NO: 571 - DNA, 2154 bp, synthetic construct
  source 1..2154: mol_type = other DNA; note = ahcMetxahTrop2_h20 L6 Kcc hIgG1LALAPA DNA
gacatcgtgatgacacagagccctgatagcctggccgtgtctctgggagagagagccaccatcaactgcaagagcagccagagcctgctgtacacctccagccagaagaactacctggcctggtatcagcagaagcccggccagcctcctaagctgctgatctactgggccagcaccagagaaagcggcgtgcccgatagattttctggctctggcagcggcaccgacttcaccctgacaatttctagcctgcaagccgaggacgtggccgtgtactactgccagcagtactacgcttacccctggacctttggcggaggcaccaagctggaaatcaaggctagtggaggcagcgacatccagatgacacagagccctagcagcctgtctgccagcgtgggagacagagtgaccattacctgtcaggccagccaggacatcaacaagtacctggcctggtatcagaagaagcccggcaaggctcctaagctgctgatccactacaccagcaacctgcagacaggcgtgcccagcagattttctggcagcggctctggcaccgacttcaccttcaccataagcagcctgcagcctgaggatatcgccacctactactgcctgcagtacgacgacctgttcacctttggccagggcaccaagctggaaatcaaaggaggcggaggatctggcggatctggaagtggcggcggtggatctgcttctggctctggccaggtgcagctggtgcagtctggcgccgaagttaagaaacctggcgcctccgtgaaggtgtcctgtaaagccagcggcagcagcttcaccggctacaccatgaactgggtcaagcaggctcctggacagggactcgagtggatcggcatcatcaacccctaccagggcgacaccacctacaaccagaagttccagggcaaagtcaccatcaccgtggacaagagcaccagcaccgtgtacatggaactgtccagcctgagaagcgaggacaccgccgtgtactactgtgctagaggcgccggactgtactacttcgactattggggccagggaaccaccgtgaccgttagctctgctagtggaggcagccaggttcagctggttcagtctggcgccgaggttgtgaaacctggcgcctctgtgaagctgagctgtaaagccagcggctacaccttcaccagctactggctgcactgggtccgacaggctccaggacaaggactggaatgggtcggaatgatcgaccccagcaacagcgacacccggttcaaccccaacttcaaggacagagtgaccatcaccgccgacaccagcacaagcaccgcctacatggaactgagcagcctgagaagcgaggacaccgccgtgtactactgcgccacctacaagagctacgtgtcccctctggattactggggccagggcacaagcgtgacagtgtcatctgctagtggcggctccggagataagacccacacatgtcctccatgtcctgctccagaagctgccggcggaccttccgtgtttctgttccctccaaagcctaaggacaccctgatgatcagcaggacccctgaagtgacctgcgtggtggtggatgtgtctcacgaggacccagaagtgaagttcaattggtacgtggacggcgtggaagtgcacaacgccaagaccaagcctagagaggaacagtacaacagcacctacagagtggtgtccgtgctgacagtgctgcaccaggattggctgaacggcaaagagtacaagtgcaaggtgtccaacaaggccctggctgcccctatcgagaaaaccatcagcaaggccaagggccagcctagggaaccccaggtttacacccttcctccatgccgggatgagctgaccaagaaccaggtgtccctgtggtgtctggtcaagggcttctaccccagcgacattgccgtggaatgggagagcaatggccagcctgagaacaactacaagaccacacctcctgtgctggactccgacggatcattcttcctgtacagcaagctgactgtggacaagagcagatggcagcagggcaacgtgttcagctgcagcgtgatgcacgaggccctgcacaaccactacacacagaagtccctgtctctgagccctggc

SEQ ID NO: 572 - protein, 718 aa, synthetic construct
  source 1..718: note = ahTrop2_h20xahcMet L6 Kcc hIgG1LALAPA - peptide
DIQMTQSPSSLSASVGDRVTITCQASQDINKYLAWYQKKPGKAPKLLIHYTSNLQTGVPSRFSGSGSGTDFTFTISSLQPEDIATYYCLQYDDLFTFGQGTKLEIKASGGSDIVMTQSPDSLAVSLGERATINCKSSQSLLYTSSQKNYLAWYQQKPGQPPKLLIYWASTRESGVPDRFSGSGSGTDFTLTISSLQAEDVAVYYCQQYYAYPWTFGGGTKLEIKGGGGSGGSGSGGGGSASGSGQVQLVQSGAEVVKPGASVKLSCKASGYTFTSYWLHWVRQAPGQGLEWVGMIDPSNSDTRFNPNFKDRVTITADTSTSTAYMELSSLRSEDTAVYYCATYKSYVSPLDYWGQGTSVTVSSASGGSQVQLVQSGAEVKKPGASVKVSCKASGSSFTGYTMNWVKQAPGQGLEWIGIINPYQGDTTYNQKFQGKVTITVDKSTSTVYMELSSLRSEDTAVYYCARGAGLYYFDYWGQGTTVTVSSASGGSGDKTHTCPPCPAPEAAGGPSVFLFPPKPKDTLMISRTPEVTCVVVDVSHEDPEVKFNWYVDGVEVHNAKTKPREEQYNSTYRVVSVLTVLHQDWLNGKEYKCKVSNKALAAPIEKTISKAKGQPREPQVYTLPPCRDELTKNQVSLWCLVKGFYPSDIAVEWESNGQPENNYKTTPPVLDSDGSFFLYSKLTVDKSRWQQGNVFSCSVMHEALHNHYTQKSLSLSPG

SEQ ID NO: 573 - DNA, 2154 bp, synthetic construct
  source 1..2154: mol_type = other DNA; note = ahTrop2_h20xahcMet L6 Kcc hIgG1LALAPA DNA
gacatccagatgacacagagccctagcagcctgtctgccagcgtgggagacagagtgaccattacctgtcaggccagccaggacatcaacaagtacctggcctggtatcagaagaagcccggcaaggctcctaagctgctgatccactacaccagcaacctgcagacaggcgtgcccagcagattttctggcagcggctctggcaccgacttcaccttcaccataagcagcctgcagcctgaggatatcgccacctactactgcctgcagtacgacgacctgttcacctttggccagggcaccaagctggaaatcaaagctagtggaggcagcgacatcgtgatgacacagagccctgatagcctggccgtgtctctgggagagagagccaccatcaactgcaagagcagccagagcctgctgtacacctccagccagaagaactacctggcctggtatcagcagaagcccggccagcctcctaagctgctgatctactgggccagcaccagagaaagcggcgtgcccgatagattttctggctctggcagcggcaccgacttcaccctgacaatttctagcctgcaagccgaggacgtggccgtgtactactgccagcagtactacgcttacccctggacctttggcggaggcaccaagctggaaatcaagggaggcggaggatctggcggatctggaagtggcggcggtggatctgcttctggctctggccaggttcagctggttcagtctggcgccgaggttgtgaaacctggcgcctctgtgaagctgagctgtaaagccagcggctacaccttcaccagctactggctgcactgggtccgacaggctccaggacaaggactggaatgggtcggaatgatcgaccccagcaacagcgacacccggttcaaccccaacttcaaggacagagtgaccatcaccgccgacaccagcacaagcaccgcctacatggaactgagcagcctgagaagcgaggacaccgccgtgtactactgcgccacctacaagagctacgtgtcccctctggattactggggccagggcacaagcgtgacagtgtcatctgctagtggaggcagccaggtgcagctggtgcagtctggcgccgaagttaagaaacctggcgcctccgtgaaggtgtcctgtaaagccagcggcagcagcttcaccggctacaccatgaactgggtcaagcaggctcctggacagggactcgagtggatcggcatcatcaacccctaccagggcgacaccacctacaaccagaagttccagggcaaagtcaccatcaccgtggacaagagcaccagcaccgtgtacatggaactgtccagcctgagaagcgaggacaccgccgtgtactactgtgctagaggcgccggactgtactacttcgactattggggccagggaaccaccgtgaccgttagctctgctagtggcggctccggagataagacccacacatgtcctccatgtcctgctccagaagctgccggcggaccttccgtgtttctgttccctccaaagcctaaggacaccctgatgatcagcaggacccctgaagtgacctgcgtggtggtggatgtgtctcacgaggacccagaagtgaagttcaattggtacgtggacggcgtggaagtgcacaacgccaagaccaagcctagagaggaacagtacaacagcacctacagagtggtgtccgtgctgacagtgctgcaccaggattggctgaacggcaaagagtacaagtgcaaggtgtccaacaaggccctggctgcccctatcgagaaaaccatcagcaaggccaagggccagcctagggaaccccaggtttacacccttcctccatgccgggatgagctgaccaagaaccaggtgtccctgtggtgtctggtcaagggcttctaccccagcgacattgccgtggaatgggagagcaatggccagcctgagaacaactacaagaccacacctcctgtgctggactccgacggatcattcttcctgtacagcaagctgactgtggacaagagcagatggcagcagggcaacgtgttcagctgcagcgtgatgcacgaggccctgcacaaccactacacacagaagtccctgtctctgagccctggc

SEQ ID NO: 574 - protein, 714 aa, synthetic construct
  source 1..714: note = ahcMetxahTrop2_h20 L7 Kcc hIgG1LALAPA peptide
DIVMTQSPDSLAVSLGERATINCKSSQSLLYTSSQKNYLAWYQQKPGQPPKLLIYWASTRESGVPDRFSGSGSGTDFTLTISSLQAEDVAVYYCQQYYAYPWTFGGGTKLEIKGGSDIQMTQSPSSLSASVGDRVTITCQASQDINKYLAWYQKKPGKAPKLLIHYTSNLQTGVPSRFSGSGSGTDFTFTISSLQPEDIATYYCLQYDDLFTFGQGTKLEIKGGGGSGGSGSGGGGSASGSGQVQLVQSGAEVKKPGASVKVSCKASGSSFTGYTMNWVKQAPGQGLEWIGIINPYQGDTTYNQKFQGKVTITVDKSTSTVYMELSSLRSEDTAVYYCARGAGLYYFDYWGQGTTVTVSSGGSQVQLVQSGAEVVKPGASVKLSCKASGYTFTSYWLHWVRQAPGQGLEWVGMIDPSNSDTRFNPNFKDRVTITADTSTSTAYMELSSLRSEDTAVYYCATYKSYVSPLDYWGQGTSVTVSSASGGSGDKTHTCPPCPAPEAAGGPSVFLFPPKPKDTLMISRTPEVTCVVVDVSHEDPEVKFNWYVDGVEVHNAKTKPREEQYNSTYRVVSVLTVLHQDWLNGKEYKCKVSNKALAAPIEKTISKAKGQPREPQVYTLPPCRDELTKNQVSLWCLVKGFYPSDIAVEWESNGQPENNYKTTPPVLDSDGSFFLYSKLTVDKSRWQQGNVFSCSVMHEALHNHYTQKSLSLSPG

SEQ ID NO: 575 - DNA, 2142 bp, synthetic construct
  source 1..2142: mol_type = other DNA; note = ahcMetxahTrop2_h20 L7 Kcc hIgG1LALAPA - DNA
gacatcgtgatgacacagagccctgatagcctggccgtgtctctgggagagagagccaccatcaactgcaagagcagccagagcctgctgtacacctccagccagaagaactacctggcctggtatcagcagaagcccggccagcctcctaagctgctgatctactgggccagcaccagagaaagcggcgtgcccgatagattttctggctctggcagcggcaccgacttcaccctgacaatttctagcctgcaagccgaggacgtggccgtgtactactgccagcagtactacgcttacccctggacctttggcggaggcaccaagctggaaatcaagggaggcagcgacatccagatgacacagagccctagcagcctgtctgccagcgtgggagacagagtgaccattacctgtcaggccagccaggacatcaacaagtacctggcctggtatcagaagaagcccggcaaggctcctaagctgctgatccactacaccagcaacctgcagacaggcgtgcccagcagattttctggcagcggctctggcaccgacttcaccttcaccataagcagcctgcagcctgaggatatcgccacctactactgcctgcagtacgacgacctgttcacctttggccagggcaccaagctggaaatcaaaggaggcggaggatctggcggatctggaagtggcggcggtggatctgcttctggctctggccaggtgcagctggtgcagtctggcgccgaagttaagaaacctggcgcctccgtgaaggtgtcctgtaaagccagcggcagcagcttcaccggctacaccatgaactgggtcaagcaggctcctggacagggactcgagtggatcggcatcatcaacccctaccagggcgacaccacctacaaccagaagttccagggcaaagtcaccatcaccgtggacaagagcaccagcaccgtgtacatggaactgtccagcctgagaagcgaggacaccgccgtgtactactgtgctagaggcgccggactgtactacttcgactattggggccagggaaccaccgtgaccgttagctctggaggcagccaggttcagctggttcagtctggcgccgaggttgtgaaacctggcgcctctgtgaagctgagctgtaaagccagcggctacaccttcaccagctactggctgcactgggtccgacaggctccaggacaaggactggaatgggtcggaatgatcgaccccagcaacagcgacacccggttcaaccccaacttcaaggacagagtgaccatcaccgccgacaccagcacaagcaccgcctacatggaactgagcagcctgagaagcgaggacaccgccgtgtactactgcgccacctacaagagctacgtgtcccctctggattactggggccagggcacaagcgtgacagtgtcatctgctagtggcggctccggagataagacccacacatgtcctccatgtcctgctccagaagctgccggcggaccttccgtgtttctgttccctccaaagcctaaggacaccctgatgatcagcaggacccctgaagtgacctgcgtggtggtggatgtgtctcacgaggacccagaagtgaagttcaattggtacgtggacggcgtggaagtgcacaacgccaagaccaagcctagagaggaacagtacaacagcacctacagagtggtgtccgtgctgacagtgctgcaccaggattggctgaacggcaaagagtacaagtgcaaggtgtccaacaaggccctggctgcccctatcgagaaaaccatcagcaaggccaagggccagcctagggaaccccaggtttacacccttcctccatgccgggatgagctgaccaagaaccaggtgtccctgtggtgtctggtcaagggcttctaccccagcgacattgccgtggaatgggagagcaatggccagcctgagaacaactacaagaccacacctcctgtgctggactccgacggatcattcttcctgtacagcaagctgactgtggacaagagcagatggcagcagggcaacgtgttcagctgcagcgtgatgcacgaggccctgcacaaccactacacacagaagtccctgtctctgagccctggc

SEQ ID NO: 576 - skipped

SEQ ID NO: 577 - protein, 714 aa, synthetic construct
  source 1..714: note = ahTrop2_h20xahcMet_L7 Kcc hIgG1LALAPA - peptide
DIQMTQSPSSLSASVGDRVTITCQASQDINKYLAWYQKKPGKAPKLLIHYTSNLQTGVPSRFSGSGSGTDFTFTISSLQPEDIATYYCLQYDDLFTFGQGTKLEIKGGSDIVMTQSPDSLAVSLGERATINCKSSQSLLYTSSQKNYLAWYQQKPGQPPKLLIYWASTRESGVPDRFSGSGSGTDFTLTISSLQAEDVAVYYCQQYYAYPWTFGGGTKLEIKGGGGSGGSGSGGGGSASGSGQVQLVQSGAEVVKPGASVKLSCKASGYTFTSYWLHWVRQAPGQGLEWVGMIDPSNSDTRFNPNFKDRVTITADTSTSTAYMELSSLRSEDTAVYYCATYKSYVSPLDYWGQGTSVTVSSGGSQVQLVQSGAEVKKPGASVKVSCKASGSSFTGYTMNWVKQAPGQGLEWIGIINPYQGDTTYNQKFQGKVTITVDKSTSTVYMELSSLRSEDTAVYYCARGAGLYYFDYWGQGTTVTVSSASGGSGDKTHTCPPCPAPEAAGGPSVFLFPPKPKDTLMISRTPEVTCVVVDVSHEDPEVKFNWYVDGVEVHNAKTKPREEQYNSTYRVVSVLTVLHQDWLNGKEYKCKVSNKALAAPIEKTISKAKGQPREPQVYTLPPCRDELTKNQVSLWCLVKGFYPSDIAVEWESNGQPENNYKTTPPVLDSDGSFFLYSKLTVDKSRWQQGNVFSCSVMHEALHNHYTQKSLSLSPG

SEQ ID NO: 578 - skipped

SEQ ID NO: 579 - protein, 714 aa, synthetic construct
  source 1..714: note = ahCD28_TgcsxahCD3 L5 Kcc hIgG1LALAPA - peptide
DIQMTQSPSSLSASVGDRVTITCHASQNIYVWLNWYQQKPGKAPKLLIYKASNLHTGVPSRFSGSGSGTDFTLTISSLQPEDFATYYCQQGQTYPYTFGGGTKVEIKGGGGSDIQLTQSPSSLSASVGDRVTITCRASQSISYLNWYQQKPGKSPKRWIYDTSKLASGVPSRFSGSGSGTDYTLTISSMQPEDAATYYCQQWSSNPLTFGGGTKVEIKGGGGSGGSGSGGGGSASGSGQVQLVQSGAEVAKPGASVKVSCKASGYTFTRYTMHWVKQAPGQGLEWIGYINPSRGYTNYAQKFQGKATLTTDKSTSTAYMELSSLRSEDTAVYYCARYYDDHYSLDYWGQGTTLTVSSGGGGSQVQLVQSGAEVKKPGASVKVSCKASGYTFTSYYIHWVRQAPGQGLEWIGSIYPGNVNTNYNEKFKDRATLTVDTSISTAYMELSRLRSDDTAVYFCTRSHYGLDWNFDVWGQGTTVTVSSASGGSGDKTHTCPPCPAPEAAGGPSVFLFPPKPKDTLMISRTPEVTCVVVDVSHEDPEVKFNWYVDGVEVHNAKTKPREEQYNSTYRVVSVLTVLHQDWLNGKEYKCKVSNKALAAPIEKTISKAKGQPREPQVYTLPPCRDELTKNQVSLWCLVKGFYPSDIAVEWESNGQPENNYKTTPPVLDSDGSFFLYSKLTVDKSRWQQGNVFSCSVMHEALHNHYTQKSLSLSPG

SEQ ID NO: 580 - DNA, 2142 bp, synthetic construct
  source 1..2142: mol_type = other DNA; note = ahCD28_TgcsxahCD3 L5 Kcc hIgG1LALAPA - DNA
gacatccagatgacacagagccctagcagcctgtctgccagcgtgggagacagagtgaccatcacatgtcacgccagccagaacatctacgtgtggctgaactggtatcagcagaagcccggcaaggcccctaagctgctgatctacaaggccagcaatctgcacaccggcgtgcccagcagattttctggctctggcagcggcaccgacttcaccctgaccatatctagcctgcagcctgaggacttcgccacctactattgtcagcagggccagacatacccctacacctttggcggcggaacaaaggtggaaatcaagggaggcggtggatctgacatccagctgacacagagcccttctagcctgtctgccagcgtgggcgacagagtgaccatcacatgtagagccagccagagcatcagctacctgaactggtatcagcagaagcccggcaagagccccaagcggtggatctacgatacaagcaagctggcctctggcgtgcccagcagattttctggctctggcagcggcaccgactacaccctgacaatcagcagcatgcagcctgaggatgccgccacctactactgccagcagtggtccagcaatcccctgacatttggcggaggcaccaaggtggaaatcaagggtggcggaggaagcggcggatcaggatctggcggcggaggatctgctagcggatctggacaggttcagctggttcagtctggcgccgaagtggctaaacctggcgcctccgtgaaggtgtcctgtaaagccagcggctacacattcacccggtacaccatgcactgggtcaagcaggctccaggacaaggcttggagtggatcggctacatcaaccctagccggggctacaccaattacgcccagaagttccagggcaaggccacactgaccaccgacaagagcacaagcaccgcctacatggaactgagcagcctgagaagcgaggacaccgccgtgtactactgtgcccggtactacgacgaccactacagcctggattattggggccagggcacaaccctgaccgtgtcatctggaggcggtggatctcaggttcagctggttcagtctggcgccgaagtgaagaaacctggcgcctctgtgaaggtgtcctgcaaggccagcggctacacctttaccagctactacatccactgggtccgacaggcccctggacaaggactggaatggatcggcagcatctaccccggcaacgtgaacaccaactacaacgagaagttcaaggaccgggccacactgaccgtggacacctctatcagcaccgcctacatggaactgagccggctgagatccgatgataccgccgtgtacttctgcaccagaagccactacggcctggactggaacttcgatgtgtggggccagggcaccaccgtgacagtttcttctgcttctggaggctccggagataagacccacacatgtcctccatgtcctgctccagaagctgccggcggaccttccgtgtttctgttccctccaaagcctaaggacaccctgatgatcagcaggacccctgaagtgacctgcgtggtggtggatgtgtctcacgaggacccagaagtgaagttcaattggtacgtggacggcgtggaagtgcacaacgccaagaccaagcctagagaggaacagtacaacagcacctacagagtggtgtccgtgctgacagtgctgcaccaggattggctgaacggcaaagagtacaagtgcaaggtgtccaacaaggccctggctgcccctatcgagaaaaccatcagcaaggccaagggccagcctagggaaccccaggtttacacccttcctccatgccgggatgagctgaccaagaaccaggtgtccctgtggtgtctggtcaagggcttctaccccagcgacattgccgtggaatgggagagcaatggccagcctgagaacaactacaagaccacacctcctgtgctggactccgacggatcattcttcctgtacagcaagctgactgtggacaagagcagatggcagcagggcaacgtgttcagctgcagcgtgatgcacgaggccctgcacaaccactacacacagaagtccctgtctctgagccctggc

SEQ ID NO: 581 - protein, 718 aa, synthetic construct
  source 1..718: note = ahcMetxahTrop2_h20N60S L5 Kcc hIgG1LALAPA peptide
DIVMTQSPDSLAVSLGERATINCKSSQSLLYTSSQKNYLAWYQQKPGQPPKLLIYWASTRESGVPDRFSGSGSGTDFTLTISSLQAEDVAVYYCQQYYAYPWTFGGGTKLEIKGGGGSDIQMTQSPSSLSASVGDRVTITCQASQDINKYLAWYQKKPGKAPKLLIHYTSNLQTGVPSRFSGSGSGTDFTFTISSLQPEDIATYYCLQYDDLFTFGQGTKLEIKGGGGSGGSGSGGGGSASGSGQVQLVQSGAEVKKPGASVKVSCKASGSSFTGYTMNWVKQAPGQGLEWIGIINPYQGDTTYSQKFQGKVTITVDKSTSTVYMELSSLRSEDTAVYYCARGAGLYYFDYWGQGTTVTVSSGGGGSQVQLVQSGAEVVKPGASVKLSCKASGYTFTSYWLHWVRQAPGQGLEWVGMIDPSNSDTRFNPNFKDRVTITADTSTSTAYMELSSLRSEDTAVYYCATYKSYVSPLDYWGQGTSVTVSSASGGSGDKTHTCPPCPAPEAAGGPSVFLFPPKPKDTLMISRTPEVTCVVVDVSHEDPEVKFNWYVDGVEVHNAKTKPREEQYNSTYRVVSVLTVLHQDWLNGKEYKCKVSNKALAAPIEKTISKAKGQPREPQVYTLPPCRDELTKNQVSLWCLVKGFYPSDIAVEWESNGQPENNYKTTPPVLDSDGSFFLYSKLTVDKSRWQQGNVFSCSVMHEALHNHYTQKSLSLSPG

SEQ ID NO: 582 - DNA, 2154 bp, synthetic construct
  source 1..2154: mol_type = other DNA; note = ahcMetxahTrop2_h20N60S L5 Kcc hIgG1LALAPA - DNA
gacatcgtgatgacacagagccctgatagcctggccgtgtctctgggagagagagccaccatcaactgcaagagcagccagagcctgctgtacacctccagccagaagaactacctggcctggtatcagcagaagcccggccagcctcctaagctgctgatctactgggccagcaccagagaaagcggcgtgcccgatagattttctggctctggcagcggcaccgacttcaccctgacaatttctagcctgcaagccgaggacgtggccgtgtactactgccagcagtactacgcttacccctggacctttggcggaggcaccaagctggaaatcaagggaggcggtggatctgacatccagatgacacagagccctagcagcctgtctgccagcgtgggagacagagtgaccattacctgtcaggccagccaggacatcaacaagtacctggcctggtatcagaagaagcccggcaaggctcctaagctgctgatccactacaccagcaacctgcagacaggcgtgcccagcagattttctggcagcggctctggcaccgacttcaccttcaccataagcagcctgcagcctgaggatatcgccacctactactgcctgcagtacgacgacctgttcacctttggccagggcaccaagctggaaatcaaaggaggcggaggatctggcggatctggaagtggcggcggtggatctgcttctggctctggccaggtgcagctggtgcagtctggcgccgaagttaagaaacctggcgcctccgtgaaggtgtcctgtaaagccagcggcagcagcttcaccggctacaccatgaactgggtcaagcaggctcctggacagggactcgagtggatcggcatcatcaacccctaccagggcgacaccacctacagccagaagttccagggcaaagtcaccatcaccgtggacaagagcaccagcaccgtgtacatggaactgtccagcctgagaagcgaggacaccgccgtgtactactgtgctagaggcgccggactgtactacttcgactattggggccagggaaccaccgtgaccgttagctctggaggcggtggatctcaggttcagctggttcagtctggcgccgaggttgtgaaacctggcgcctctgtgaagctgagctgtaaagccagcggctacaccttcaccagctactggctgcactgggtccgacaggctccaggacaaggactggaatgggtcggaatgatcgaccccagcaacagcgacacccggttcaaccccaacttcaaggacagagtgaccatcaccgccgacaccagcacaagcaccgcctacatggaactgagcagcctgagaagcgaggacaccgccgtgtactactgcgccacctacaagagctacgtgtcccctctggattactggggccagggcacaagcgtgacagtgtcatctgctagtggcggctccggagataagacccacacatgtcctccatgtcctgctccagaagctgccggcggaccttccgtgtttctgttccctccaaagcctaaggacaccctgatgatcagcaggacccctgaagtgacctgcgtggtggtggatgtgtctcacgaggacccagaagtgaagttcaattggtacgtggacggcgtggaagtgcacaacgccaagaccaagcctagagaggaacagtacaacagcacctacagagtggtgtccgtgctgacagtgctgcaccaggattggctgaacggcaaagagtacaagtgcaaggtgtccaacaaggccctggctgcccctatcgagaaaaccatcagcaaggccaagggccagcctagggaaccccaggtttacacccttcctccatgccgggatgagctgaccaagaaccaggtgtccctgtggtgtctggtcaagggcttctaccccagcgacattgccgtggaatgggagagcaatggccagcctgagaacaactacaagaccacacctcctgtgctggactccgacggatcattcttcctgtacagcaagctgactgtggacaagagcagatggcagcagggcaacgtgttcagctgcagcgtgatgcacgaggccctgcacaaccactacacacagaagtccctgtctctgagccctggc

SEQ ID NO: 583 - protein, 106 aa, synthetic construct; identical to SEQ ID NO: 95
  source 1..106: note = ahTrop2_h20N60S VL

SEQ ID NO: 584 - protein, 118 aa, synthetic construct
  source 1..118: note = ahTrop2_h20N60S - VH
QVQLVQSGAEVKKPGASVKVSCKASGSSFTGYTMNWVKQAPGQGLEWIGIINPYQGDTTYSQKFQGKVTITVDKSTSTVYMELSSLRSEDTAVYYCARGAGLYYFDYWGQGTTVTVSS

SEQ ID NO: 585 - protein, 718 aa, synthetic construct
  source 1..718: note = ahTrop2_h20N60SxahcMet_L5 Kcc hIgG1LALAPA
DIQMTQSPSSLSASVGDRVTITCQASQDINKYLAWYQKKPGKAPKLLIHYTSNLQTGVPSRFSGSGSGTDFTFTISSLQPEDIATYYCLQYDDLFTFGQGTKLEIKGGGGSDIVMTQSPDSLAVSLGERATINCKSSQSLLYTSSQKNYLAWYQQKPGQPPKLLIYWASTRESGVPDRFSGSGSGTDFTLTISSLQAEDVAVYYCQQYYAYPWTFGGGTKLEIKGGGGSGGSGSGGGGSASGSGQVQLVQSGAEVVKPGASVKLSCKASGYTFTSYWLHWVRQAPGQGLEWVGMIDPSNSDTRFNPNFKDRVTITADTSTSTAYMELSSLRSEDTAVYYCATYKSYVSPLDYWGQGTSVTVSSGGGGSQVQLVQSGAEVKKPGASVKVSCKASGSSFTGYTMNWVKQAPGQGLEWIGIINPYQGDTTYSQKFQGKVTITVDKSTSTVYMELSSLRSEDTAVYYCARGAGLYYFDYWGQGTTVTVSSASGGSGDKTHTCPPCPAPEAAGGPSVFLFPPKPKDTLMISRTPEVTCVVVDVSHEDPEVKFNWYVDGVEVHNAKTKPREEQYNSTYRVVSVLTVLHQDWLNGKEYKCKVSNKALAAPIEKTISKAKGQPREPQVYTLPPCRDELTKNQVSLWCLVKGFYPSDIAVEWESNGQPENNYKTTPPVLDSDGSFFLYSKLTVDKSRWQQGNVFSCSVMHEALHNHYTQKSLSLSPG

SEQ ID NO: 586 - DNA, 2154 bp, synthetic construct
  source 1..2154: mol_type = other DNA; note = ahTrop2_h20N60SxahcMet_L5 Kcc hIgG1LALAPA
gacatccagatgacacagagccctagcagcctgtctgccagcgtgggagacagagtgaccattacctgtcaggccagccaggacatcaacaagtacctggcctggtatcagaagaagcccggcaaggctcctaagctgctgatccactacaccagcaacctgcagacaggcgtgcccagcagattttctggcagcggctctggcaccgacttcaccttcaccataagcagcctgcagcctgaggatatcgccacctactactgcctgcagtacgacgacctgttcacctttggccagggcaccaagctggaaatcaaaggaggcggtggatctgacatcgtgatgacacagagccctgatagcctggccgtgtctctgggagagagagccaccatcaactgcaagagcagccagagcctgctgtacacctccagccagaagaactacctggcctggtatcagcagaagcccggccagcctcctaagctgctgatctactgggccagcaccagagaaagcggcgtgcccgatagattttctggctctggcagcggcaccgacttcaccctgacaatttctagcctgcaagccgaggacgtggccgtgtactactgccagcagtactacgcttacccctggacctttggcggaggcaccaagctggaaatcaagggaggcggaggatctggcggatctggaagtggcggcggtggatctgcttctggctctggccaggttcagctggttcagtctggcgccgaggttgtgaaacctggcgcctctgtgaagctgagctgtaaagccagcggctacaccttcaccagctactggctgcactgggtccgacaggctccaggacaaggactggaatgggtcggaatgatcgaccccagcaacagcgacacccggttcaaccccaacttcaaggacagagtgaccatcaccgccgacaccagcacaagcaccgcctacatggaactgagcagcctgagaagcgaggacaccgccgtgtactactgcgccacctacaagagctacgtgtcccctctggattactggggccagggcacaagcgtgacagtgtcatctggaggcggtggatctcaggtgcagctggtgcagtctggcgccgaagttaagaaacctggcgcctccgtgaaggtgtcctgtaaagccagcggcagcagcttcaccggctacaccatgaactgggtcaagcaggctcctggacagggactcgagtggatcggcatcatcaacccctaccagggcgacaccacctacagccagaagttccagggcaaagtcaccatcaccgtggacaagagcaccagcaccgtgtacatggaactgtccagcctgagaagcgaggacaccgccgtgtactactgtgctagaggcgccggactgtactacttcgactattggggccagggaaccaccgtgaccgttagctctgctagtggcggctccggagataagacccacacatgtcctccatgtcctgctccagaagctgccggcggaccttccgtgtttctgttccctccaaagcctaaggacaccctgatgatcagcaggacccctgaagtgacctgcgtggtggtggatgtgtctcacgaggacccagaagtgaagttcaattggtacgtggacggcgtggaagtgcacaacgccaagaccaagcctagagaggaacagtacaacagcacctacagagtggtgtccgtgctgacagtgctgcaccaggattggctgaacggcaaagagtacaagtgcaaggtgtccaacaaggccctggctgcccctatcgagaaaaccatcagcaaggccaagggccagcctagggaaccccaggtttacacccttcctccatgccgggatgagctgaccaagaaccaggtgtccctgtggtgtctggtcaagggcttctaccccagcgacattgccgtggaatgggagagcaatggccagcctgagaacaactacaagaccacacctcctgtgctggactccgacggatcattcttcctgtacagcaagctgactgtggacaagagcagatggcagcagggcaacgtgttcagctgcagcgtgatgcacgaggccctgcacaaccactacacacagaagtccctgtctctgagccctggc

SEQ ID NO: 587 - protein, 716 aa, synthetic construct
  source 1..716: note = ahCD20_ofxahCD3 L1Hcc hIgG1LALAPA peptide
EIVLTQSPATLSLSPGERATLSCRASQSVSSYLAWYQQKPGQAPRLLIYDASNRATGIPARFSGSGSGTDFTLTISSLEPEDFAVYYCQQRSNWPITFGQGTRLEIKGGSSGDIQLTQSPSSLSASVGDRVTITCRASQSISYLNWYQQKPGKSPKRWIYDTSKLASGVPSRFSGSGSGTDYTLTISSMQPEDAATYYCQQWSSNPLTFGGGTKVEIKGGGGSGGSGSGGGGSASGSGQVQLVQSGAEVAKPGASVKVSCKASGYTFTRYTMHWVKQAPGQGLEWIGYINPSRGYTNYAQKFQGKATLTTDKSTSTAYMELSSLRSEDTAVYYCARYYDDHYSLDYWGQGTTLTVSSGGSSGEVQLVESGGGLVQPGRSLRLSCAASGFTFNDYAMHWVRQAPGKGLEWVSTISWNSGSIGYADSVKGRFTISRDNAKKSLYLQMNSLRAEDTALYYCAKDIQYGNYYYGMDVWGQGTTVTVSSASGGSGDKTHTCPPCPAPEAAGGPSVFLFPPKPKDTLMISRTPEVTCVVVDVSHEDPEVKFNWYVDGVEVHNAKTKPREEQYNSTYRVVSVLTVLHQDWLNGKEYKCKVSNKALAAPIEKTISKAKGQPREPQVCTLPPSRDELTKNQVSLSCAVKGFYPSDIAVEWESNGQPENNYKTTPPVLDSDGSFFLVSKLTVDKSRWQQGNVFSCSVMHEALHNHYTQKSLSLSPG

SEQ ID NO: 588 - DNA, 2148 bp, synthetic construct
  source 1..2148: mol_type = other DNA; note = ahCD20_ofxahCD3 L1Hcc hIgG1LALAPA - DNA
gagatcgtgctgacacagtctcccgccacactgtcactgtctccaggcgaaagagccacactgagctgtagagccagccagagcgtgtcctcttacctggcctggtatcagcagaagcctggacaggctccccggctgctgatctacgatgccagcaatagagccacaggcatccccgccagattttctggctctggcagcggcaccgatttcaccctgaccataagcagcctggaacctgaggacttcgccgtgtactactgccagcagagaagcaactggcccatcacctttggccagggcaccagactggaaatcaagggcggcagcagcggcgacatccagctcacacaaagcccttctagcctgtctgccagcgtgggagatcgcgtgaccattacctgcagagcctctcagagcatcagctacctgaactggtatcaacaaaaacccggcaagagcccaaagcggtggatctacgataccagcaagctggcctctggcgtgccctccagattctctggttctggaagcggcaccgactacacactgaccatcagcagcatgcagccagaggatgccgccacatattattgtcagcagtggtccagcaatcccctgaccttcggaggcggaacaaaggtcgagatcaaaggtggcggaggatctggcggaagtggttctggcggtggtggatctgcttctggctctggacaggtgcagctggttcagtctggtgccgaagtggctaaacctggcgcctccgtgaaggtgtcctgtaaagccagcggctacacattcacccggtacaccatgcactgggtcaagcaggctccaggacagggactcgagtggatcggctacatcaaccccagcagaggctacaccaactacgcccagaagttccagggcaaagccactctgaccaccgacaagagcaccagcaccgcctacatggaactgtccagcctgagaagcgaggataccgccgtgtactactgcgcccggtactacgacgatcactacagcctggattactggggccagggcaccacactgacagtgtctagtggcggatctagcggcgaggtgcagctggttgaatctggcggaggactggtgcagcctggcagaagtctgagactgtcttgtgccgccagcggcttcaccttcaacgactatgccatgcactgggtccgacaggcccctggcaaaggacttgaatgggtgtccaccatcagctggaacagcggctctatcggctacgccgattccgtgaagggcagattcaccatctccagagacaacgccaagaagtccctgtacctgcagatgaacagcctgagagccgaggacacagccctgtactactgcgccaaggacatccagtacggcaactactactacggcatggacgtgtggggccagggcacaacagtgacagtctcttctgctagcggaggttccggagataagacccacacatgtcctccatgtcctgctccagaggctgctggtggcccttccgtgtttctgttccctccaaagcctaaggacaccctgatgatcagcaggacccctgaagtgacctgcgtggtggtggatgtgtctcacgaggacccagaagtgaagttcaattggtacgtggacggcgtggaagtgcacaacgccaagaccaagcctagagaggaacagtacaacagcacctacagagtggtgtccgtgctgaccgtgctgcaccaggattggctgaacggcaaagagtacaagtgcaaggtgtccaacaaggccctggccgctcctatcgagaaaaccatcagcaaggccaagggccagcctcgcgaacctcaagtctgtacactgcctcctagccgggacgagctgaccaagaatcaggtgtcactgagctgcgccgtgaagggcttttaccccagcgacattgccgtggaatgggagagcaatggccagccagagaacaactacaagacaacccctcctgtgctggacagcgacggctcatttttcctggtgtccaagctgacagtggacaagagcagatggcagcagggcaacgtgttcagctgcagcgtgatgcacgaggccctgcacaaccactacacccagaaaagcctgtctctgagccctggc

SEQ ID NO: 589 - protein, 715 aa, synthetic construct
  source 1..715: note = ahCD20_PSxahCD3L1Hcc hIgG1LALAPA peptide
DIVLTQSPAILSASPGEKVTMTCRASSSVNYMDWYQKKPGSSPKPWIYATSNLASGVPARFSGSGSGTSYSLTISRVEAEDAATYYCQQWSFNPPTFGGGTKLEIKGGSSGDIQLTQSPSSLSASVGDRVTITCRASQSISYLNWYQQKPGKSPKRWIYDTSKLASGVPSRFSGSGSGTDYTLTISSMQPEDAATYYCQQWSSNPLTFGGGTKVEIKGGGGSGGSGSGGGGSASGSGQVQLVQSGAEVAKPGASVKVSCKASGYTFTRYTMHWVKQAPGQGLEWIGYINPSRGYTNYAQKFQGKATLTTDKSTSTAYMELSSLRSEDTAVYYCARYYDDHYSLDYWGQGTTLTVSSGGSSGEVQLQQSGAELVKPGASVKMSCKASGYTFTSYNMHWVKQTPGQGLEWIGAIYPGNGDTSYNQKFKGKATLTADKSSSTAYMQLSSLTSEDSADYYCARSNYYGSSYWFFDVWGAGTTVTVSSASGGSGDKTHTCPPCPAPEAAGGPSVFLFPPKPKDTLMISRTPEVTCVVVDVSHEDPEVKFNWYVDGVEVHNAKTKPREEQYNSTYRVVSVLTVLHQDWLNGKEYKCKVSNKALAAPIEKTISKAKGQPREPQVCTLPPSRDELTKNQVSLSCAVKGFYPSDIAVEWESNGQPENNYKTTPPVLDSDGSFFLVSKLTVDKSRWQQGNVFSCSVMHEALHNHYTQKSLSLSPG

SEQ ID NO: 590 - DNA, 2145 bp, synthetic construct
  source 1..2145: mol_type = other DNA; note = ahCD20_PSxahCD3L1Hcc hIgG1LALAPA - DNA
gacatcgtgctgacacagagccctgccatcctgagtgctagccctggcgagaaagtgaccatgacctgtagagccagcagcagcgtgaactacatggactggtatcagaagaagcccggcagcagccccaagccttggatctacgccacaagcaatctggccagcggagtgcctgccagattttctggctctggcagcggcacaagctacagcctgacaatcagcagagtggaagccgaggatgccgccacctactactgtcagcagtggtccttcaatcctcctaccttcggcggaggcaccaagctggaaatcaaaggcggcagcagcggcgacatccagctcacacaaagcccttctagcctgtctgccagcgtgggagatcgcgtgaccattacctgcagagcctctcagagcatcagctacctgaactggtatcaacaaaaacccggcaagagcccaaagcggtggatctacgataccagcaagctggcctctggcgtgccctccagattctctggttctggaagcggcaccgactacacactgaccatcagcagcatgcagccagaggatgccgccacatattattgtcagcagtggtccagcaatcccctgaccttcggaggcggaacaaaggtcgagatcaaaggtggcggaggatctggcggaagtggttctggcggtggtggatctgcttctggctctggacaggtgcagctggttcagtctggtgccgaagtggctaaacctggcgcctccgtgaaggtgtcctgtaaagccagcggctacacattcacccggtacaccatgcactgggtcaagcaggctccaggacagggactcgagtggatcggctacatcaaccccagcagaggctacaccaactacgcccagaagttccagggcaaagccactctgaccaccgacaagagcaccagcaccgcctacatggaactgtccagcctgagaagcgaggataccgccgtgtactactgcgcccggtactacgacgatcactacagcctggattactggggccagggcaccacactgacagtgtctagtggcggatctagcggcgaggtgcagcttcagcaaagcggagccgaactggtcaaacctggcgcaagcgtgaagatgtcttgcaaggcctctggctacacctttacgagctacaacatgcattgggttaagcagacccctggccaaggacttgagtggatcggcgccatctatcccggcaatggcgacacctcctacaatcagaagtttaaaggcaaggctaccctcaccgccgacaagagcagctctaccgcttatatgcagctgagcagcctgacctccgaggactccgccgattactactgtgccagaagcaactactacggctcctcctactggttcttcgacgtgtggggagccggcacaacagtgactgtgtctagcgctagcggaggttccggagataagacccacacatgtcctccatgtcctgctccagaggctgctggtggcccttccgtgtttctgttccctccaaagcctaaggacaccctgatgatcagcaggacccctgaagtgacctgcgtggtggtggatgtgtctcacgaggacccagaagtgaagttcaattggtacgtggacggcgtggaagtgcacaacgccaagaccaagcctagagaggaacagtacaacagcacctacagagtggtgtccgtgctgaccgtgctgcaccaggattggctgaacggcaaagagtacaagtgcaaggtgtccaacaaggccctggccgctcctatcgagaaaaccatcagcaaggccaagggccagcctcgcgaacctcaagtctgtacactgcctcctagccgggacgagctgaccaagaatcaggtgtcactgagctgcgccgtgaagggcttttaccccagcgacattgccgtggaatgggagagcaatggccagccagagaacaactacaagacaacccctcctgtgctggacagcgacggctcatttttcctggtgtccaagctgacagtggacaagagcagatggcagcagggcaacgtgttcagctgcagcgtgatgcacgaggccctgcacaaccactacacccagaaaagcctgtctctgagccctggc

SEQ ID NO: 591 - protein, 725 aa, synthetic construct
  source 1..725: note = ahCD19xahCD20_PS L1 Hcc hIgG1LALAPA
DIQLTQSPASLAVSLGQRATISCKASQSVDYDGDSYLNWYQQIPGQPPKLLIYDASNLVSGIPPRFSGSGSGTDFTLNIHPVEKVDAATYHCQQSTEDPWTFGGGTKLEIKGGSSGDIVLTQSPAILSASPGEKVTMTCRASSSVNYMDWYQKKPGSSPKPWIYATSNLASGVPARFSGSGSGTSYSLTISRVEAEDAATYYCQQWSFNPPTFGGGTKLEIKGGGGSGGSGSGGGGSASGSGEVQLQQSGAELVKPGASVKMSCKASGYTFTSYNMHWVKQTPGQGLEWIGAIYPGNGDTSYNQKFKGKATLTADKSSSTAYMQLSSLTSEDSADYYCARSNYYGSSYWFFDVWGAGTTVTVSSGGSSGQVQLQQSGAELVRPGSSVKISCKASGYAFSSYWMNWVKQRPGQGLEWIGQIWPGDGDTNYNGKFKGKATLTADESSSTAYMQLSSLASEDSAVYFCARRETTTVGRYYYAMDYWGQGTTVTVSSASGGSGDKTHTCPPCPAPEAAGGPSVFLFPPKPKDTLMISRTPEVTCVVVDVSHEDPEVKFNWYVDGVEVHNAKTKPREEQYNSTYRVVSVLTVLHQDWLNGKEYKCKVSNKALAAPIEKTISKAKGQPREPQVYTLPPCRDELTKNQVSLWCLVKGFYPSDIAVEWESNGQPENNYKTTPPVLDSDGSFFLYSKLTVDKSRWQQGNVFSCSVMHEALHNHYTQKSLSLSPG

SEQ ID NO: 592 - DNA, 2175 bp, synthetic construct
  source 1..2175: mol_type = other DNA; note = ahCD19xahCD20_PS L1 Hcc hIgG1LALAPA
gacatccagctgacacagagccctgcttctctggccgtgtctctgggacagagagccaccatcagctgcaaggccagccagagcgttgactacgacggcgacagctacctgaactggtatcagcagatccccggccagcctcctaagctgctgatctacgatgccagcaacctggtgtctggcatccctcctagattttccggcagcggctctggcaccgacttcaccctgaatatccatcctgtggaaaaggtggacgccgccacctaccactgtcagcagagcacagaagatccctggacctttggcggaggcaccaagctggaaatcaaaggcggaagcagcggcgacatcgtgctgactcagtctccagccatcctgtctgctagccctggcgagaaagtgaccatgacctgtagagccagcagcagcgtgaactacatggattggtatcagaagaagcccggcagcagccccaagccttggatctacgccacaagcaatctggccagcggagtgcctgccagattttctggctctggaagcggcaccagctacagcctgacaatcagcagagtggaagccgaggatgccgccacttactattgccagcagtggtccttcaatcctcctaccttcggaggcggaacaaagcttgagatcaaaggtggcggaggaagcggcggatctggatctggcggcggaggatctgctagtggaagcggagaagttcagctgcagcagtctggcgccgagcttgtgaaacctggcgcctctgtgaagatgtcttgcaaggcctccggctacaccttcaccagctataacatgcactgggtcaagcagacccctggacagggcctcgaatggatcggagccatctatcccggcaacggcgacacctcctacaaccagaagttcaagggcaaagccacactgaccgccgacaagagcagcagcacagcctacatgcagctgagcagcctgaccagcgaggacagcgccgattactactgcgccagaagcaactactacggcagctcctactggttcttcgacgtgtggggagccggcaccacagtgacagttagttctggcggaagctccggccaggtgcagcttcaacaaagcggagccgaacttgtgcggcctggctctagcgtgaagatcagctgtaaagccagtggctacgcctttagcagctactggatgaattgggtcaaacagcggccaggccagggacttgagtggatcggacaaatttggcctggcgacggcgataccaactacaatggcaagtttaaaggcaaggctaccctgacagccgacgagtctagctccaccgcttatatgcagctgtctagcctggcctccgaggactccgccgtgtacttttgcgctcggagagagacaaccaccgtcggcagatattactacgccatggactactggggccagggcacaaccgtgacagtgtctagtgctagtggcggctccggagataagacccacacatgtcctccatgtcctgctccagaagctgccggcggaccttccgtgtttctgttccctccaaagcctaaggacaccctgatgatcagcaggacccctgaagtgacctgcgtggtggtggatgtgtctcacgaggacccagaagtgaagttcaattggtacgtggacggcgtggaagtgcacaacgccaagaccaagcctagagaggaacagtacaacagcacctacagagtggtgtccgtgctgacagtgctgcaccaggattggctgaacggcaaagagtacaagtgcaaggtgtccaacaaggccctggctgcccctatcgagaaaaccatcagcaaggccaagggccagcctagggaaccccaggtttacacccttcctccatgccgggatgagctgaccaagaaccaggtgtccctgtggtgtctggtcaagggcttctaccccagcgacattgccgtggaatgggagagcaatggccagcctgagaacaactacaagaccacacctcctgtgctggactccgacggatcattcttcctgtacagcaagctgactgtggacaagagcagatggcagcagggcaacgtgttcagctgcagcgtgatgcacgaggccctgcacaaccactacacacagaagtccctgtctctgagccctggc

SEQ ID NO: 593 - protein, 725 aa, synthetic construct
  source 1..725: note = ahCD20_PSxahCD19L1 Hcc hIgG1LALAPA
DIVLTQSPAILSASPGEKVTMTCRASSSVNYMDWYQKKPGSSPKPWIYATSNLASGVPARFSGSGSGTSYSLTISRVEAEDAATYYCQQWSFNPPTFGGGTKLEIKGGSSGDIQLTQSPASLAVSLGQRATISCKASQSVDYDGDSYLNWYQQIPGQPPKLLIYDASNLVSGIPPRFSGSGSGTDFTLNIHPVEKVDAATYHCQQSTEDPWTFGGGTKLEIKGGGGSGGSGSGGGGSASGSGQVQLQQSGAELVRPGSSVKISCKASGYAFSSYWMNWVKQRPGQGLEWIGQIWPGDGDTNYNGKFKGKATLTADESSSTAYMQLSSLASEDSAVYFCARRETTTVGRYYYAMDYWGQGTTVTVSSGGSSGEVQLQQSGAELVKPGASVKMSCKASGYTFTSYNMHWVKQTPGQGLEWIGAIYPGNGDTSYNQKFKGKATLTADKSSSTAYMQLSSLTSEDSADYYCARSNYYGSSYWFFDVWGAGTTVTVSSASGGSGDKTHTCPPCPAPEAAGGPSVFLFPPKPKDTLMISRTPEVTCVVVDVSHEDPEVKFNWYVDGVEVHNAKTKPREEQYNSTYRVVSVLTVLHQDWLNGKEYKCKVSNKALAAPIEKTISKAKGQPREPQVYTLPPCRDELTKNQVSLWCLVKGFYPSDIAVEWESNGQPENNYKTTPPVLDSDGSFFLYSKLTVDKSRWQQGNVFSCSVMHEALHNHYTQKSLSLSPG

SEQ ID NO: 594 - DNA, 2175 bp, synthetic construct
  source 1..2175: mol_type = other DNA; note = ahCD20_PSxahCD19L1 Hcc hIgG1LALAPA
gacatcgtgctgacacagagccctgccatcctgagtgctagccctggcgagaaagtgaccatgacctgtagagccagcagcagcgtgaactacatggactggtatcagaagaagcccggcagcagccccaagccttggatctacgccacaagcaatctggccagcggagtgcctgccagattttctggctctggcagcggcacaagctacagcctgacaatcagcagagtggaagccgaggatgccgccacctactactgtcagcagtggtccttcaatcctcctaccttcggcggaggcaccaagctggaaatcaaaggcggaagcagcggcgacatccagctgactcaatctccagcctctctggccgtgtcactgggacagagagccaccatcagctgcaaggccagccagtccgtggactacgatggcgacagctacctgaattggtatcagcagatccccggccagcctcctaagctgctgatctacgatgccagcaacctggtgtctggcatccctcctagattttccggcagcggaagcggcaccgacttcaccctgaatatccatcctgtggaaaaggtggacgccgccacatatcactgccagcagagcaccgaagatccctggacatttggaggcggaacaaagcttgagatcaaaggtggcggaggctccggcggatctggatctggcggcggaggatctgctagtggatctggacaggttcagctgcagcagtctggcgccgaactcgttagacctggcagctccgtgaagatcagctgtaaagcctccggctacgccttcagcagctactggatgaactgggtcaagcagaggccaggccagggcctcgaatggatcggacaaatttggcctggcgacggcgacaccaactacaacggcaagttcaagggcaaagccacactgaccgccgacgagtctagcagcacagcctacatgcagctgtctagcctggctagcgaggacagcgccgtgtacttctgcgctagaagagagacaaccaccgtcggccggtactactacgccatggattattggggccagggcaccaccgtgacagtgtcaagtggtggatcttccggcgaggtgcagcttcagcaaagcggagccgaactggtcaaacctggcgcaagcgtgaagatgtcttgcaaggcctctggctacacctttacgagctacaacatgcattgggttaagcagacccctggccaaggacttgagtggatcggcgccatctatcccggcaatggcgacacctcctacaatcagaagtttaaaggcaaggctaccctcaccgccgacaagagcagctctaccgcttatatgcagctgagcagcctgacctccgaggactccgccgattactactgtgccagaagcaactactacggctcctcctactggttcttcgacgtgtggggagccggcacaacagtgactgtgtctagcgctagtggcggctccggagataagacccacacatgtcctccatgtcctgctccagaagctgccggcggaccttccgtgtttctgttccctccaaagcctaaggacaccctgatgatcagcaggacccctgaagtgacctgcgtggtggtggatgtgtctcacgaggacccagaagtgaagttcaattggtacgtggacggcgtggaagtgcacaacgccaagaccaagcctagagaggaacagtacaacagcacctacagagtggtgtccgtgctgacagtgctgcaccaggattggctgaacggcaaagagtacaagtgcaaggtgtccaacaaggccctggctgcccctatcgagaaaaccatcagcaaggccaagggccagcctagggaaccccaggtttacacccttcctccatgccgggatgagctgaccaagaaccaggtgtccctgtggtgtctggtcaagggcttctaccccagcgacattgccgtggaatgggagagcaatggccagcctgagaacaactacaagaccacacctcctgtgctggactccgacggatcattcttcctgtacagcaagctgactgtggacaagagcagatggcagcagggcaacgtgttcagctgcagcgtgatgcacgaggccctgcacaaccactacacacagaagtccctgtctctgagccctggc

SEQ ID NO: 595 - protein, 718 aa, synthetic construct
  source 1..718: note = ahCD20_ofxahCD28Tgcs Kcc hIgG1LALAPA peptide
EIVLTQSPATLSLSPGERATLSCRASQSVSSYLAWYQQKPGQAPRLLIYDASNRATGIPARFSGSGSGTDFTLTISSLEPEDFAVYYCQQRSNWPITFGQGTRLEIKGGSSGDIQMTQSPSSLSASVGDRVTITCHASQNIYVWLNWYQQKPGKAPKLLIYKASNLHTGVPSRFSGSGSGTDFTLTISSLQPEDFATYYCQQGQTYPYTFGGGTKVEIKGGGGSGGSGSGGGGSASGSGQVQLVQSGAEVKKPGASVKVSCKASGYTFTSYYIHWVRQAPGQGLEWIGSIYPGNVNTNYNEKFKDRATLTVDTSISTAYMELSRLRSDDTAVYFCTRSHYGLDWNFDVWGQGTTVTVSSGGSSGEVQLVESGGGLVQPGRSLRLSCAASGFTFNDYAMHWVRQAPGKGLEWVSTISWNSGSIGYADSVKGRFTISRDNAKKSLYLQMNSLRAEDTALYYCAKDIQYGNYYYGMDVWGQGTTVTVSSASGGSGDKTHTCPPCPAPEAAGGPSVFLFPPKPKDTLMISRTPEVTCVVVDVSHEDPEVKFNWYVDGVEVHNAKTKPREEQYNSTYRVVSVLTVLHQDWLNGKEYKCKVSNKALAAPIEKTISKAKGQPREPQVYTLPPCRDELTKNQVSLWCLVKGFYPSDIAVEWESNGQPENNYKTTPPVLDSDGSFFLYSKLTVDKSRWQQGNVFSCSVMHEALHNHYTQKSLSLSPG

SEQ ID NO: 596 - DNA, 2154 bp, synthetic construct
  source 1..2154: mol_type = other DNA; note = ahCD20_ofxahCD28Tgcs Kcc hIgG1LALAPA - DNA
gagatcgtgctgacacagtctcccgccacactgtcactgtctccaggcgaaagagccacactgagctgtagagccagccagagcgtgtcctcttacctggcctggtatcagcagaagcctggacaggctccccggctgctgatctacgatgccagcaatagagccacaggcatccccgccagattttctggctctggcagcggcaccgatttcaccctgaccataagcagcctggaacctgaggacttcgccgtgtactactgccagcagagaagcaactggcccatcacctttggccagggcaccagactggaaatcaagggcggatcttctggagacatccagatgacacagagccctagcagcctgtctgccagcgtgggagacagagtgaccatcacatgtcacgccagccagaacatctacgtgtggctgaactggtatcagcagaagcccggcaaggcccctaagctgctgatctacaaggccagcaatctgcacaccggcgtgcccagcagattttctggctctggcagcggcaccgacttcaccctgaccatatctagcctgcagcctgaggacttcgccacctactattgtcagcagggccagacatacccctacacctttggcggcggaacaaaggtggaaatcaagggaggcggaggatctggcggatctggaagtggcggcggtggatctgcttctggctctggccaggttcagctggttcagtctggcgccgaagtgaagaaacctggcgcctctgtgaaggtgtcctgcaaggccagcggctacacctttaccagctactacatccactgggtccgacaggcccctggacaaggactggaatggatcggcagcatctaccccggcaacgtgaacaccaactacaacgagaagttcaaggaccgggccacactgaccgtggacacctctatcagcaccgcctacatggaactgagccggctgagatccgatgataccgccgtgtacttctgcaccagaagccactacggcctggactggaacttcgatgtgtggggccagggcaccaccgtgacagtttcttctggaggcagctctggcgaggtgcagctggttgaatctggcggaggactggtgcagcctggcagaagtctgagactgtcttgtgccgccagcggcttcaccttcaacgactatgccatgcactgggtccgacaggcccctggcaaaggacttgaatgggtgtccaccatcagctggaacagcggctctatcggctacgccgattccgtgaagggcagattcaccatctccagagacaacgccaagaagtccctgtacctgcagatgaacagcctgagagccgaggacacagccctgtactactgcgccaaggacatccagtacggcaactactactacggcatggacgtgtggggccagggcacaacagtgacagtctcttctgcttctggcggctccggagataagacccacacatgtcctccatgtcctgctccagaagctgctggcggcccttctgtgttcctgtttcctccaaagcctaaggacaccctgatgatcagcagaacccctgaagtgacctgcgtggtggtggatgtgtctcacgaggaccccgaagtgaagttcaattggtacgtggacggcgtggaagtgcacaacgccaagaccaagcctagagaggaacagtacaacagcacctacagagtggtgtccgtgctgaccgtgctgcaccaggattggctgaacggcaaagagtacaagtgcaaggtgtccaacaaggccctggccgctcctatcgagaaaaccatcagcaaggccaagggccagcctagggaaccccaggtttacacccttcctccatgccgggatgagctgaccaagaaccaggtgtccctgtggtgtctcgtgaagggcttctaccccagcgacattgccgtggaatgggagagcaatggccagcctgagaacaactacaagacaacccctcctgtgctggacagcgacggctcattcttcctgtacagcaagctgacagtcgacaagtccagatggcagcagggcaacgtgttcagttgcagcgtgatgcacgaggccctgcacaaccactacacccagaagtccctgagcctgtctcctgga

SEQ ID NO: 597 - protein, 718 aa, synthetic construct
  source 1..718: note = ahCD28_TgcsxahCD20_ofKcc hIgG1LALAPA - peptide
DIQMTQSPSSLSASVGDRVTITCHASQNIYVWLNWYQQKPGKAPKLLIYKASNLHTGVPSRFSGSGSGTDFTLTISSLQPEDFATYYCQQGQTYPYTFGGGTKVEIKGGSSGEIVLTQSPATLSLSPGERATLSCRASQSVSSYLAWYQQKPGQAPRLLIYDASNRATGIPARFSGSGSGTDFTLTISSLEPEDFAVYYCQQRSNWPITFGQGTRLEIKGGGGSGGSGSGGGGSASGSGEVQLVESGGGLVQPGRSLRLSCAASGFTFNDYAMHWVRQAPGKGLEWVSTISWNSGSIGYADSVKGRFTISRDNAKKSLYLQMNSLRAEDTALYYCAKDIQYGNYYYGMDVWGQGTTVTVSSGGSSGQVQLVQSGAEVKKPGASVKVSCKASGYTFTSYYIHWVRQAPGQGLEWIGSIYPGNVNTNYNEKFKDRATLTVDTSISTAYMELSRLRSDDTAVYFCTRSHYGLDWNFDVWGQGTTVTVSSASGGSGDKTHTCPPCPAPEAAGGPSVFLFPPKPKDTLMISRTPEVTCVVVDVSHEDPEVKFNWYVDGVEVHNAKTKPREEQYNSTYRVVSVLTVLHQDWLNGKEYKCKVSNKALAAPIEKTISKAKGQPREPQVYTLPPCRDELTKNQVSLWCLVKGFYPSDIAVEWESNGQPENNYKTTPPVLDSDGSFFLYSKLTVDKSRWQQGNVFSCSVMHEALHNHYTQKSLSLSPG

SEQ ID NO: 598 - DNA, 2154 bp, synthetic construct
  source 1..2154: mol_type = other DNA; note = ahCD28_TgcsxahCD20_ofKcc hIgG1LALAPA - DNA
gacatccagatgacacagagccctagcagcctgtctgccagcgtgggagacagagtgaccatcacatgtcacgccagccagaacatctacgtgtggctgaactggtatcagcagaagcccggcaaggcccctaagctgctgatctacaaggccagcaatctgcacaccggcgtgcccagcagattttctggctctggcagcggcaccgacttcaccctgaccatatctagcctgcagcctgaggacttcgccacctactattgtcagcagggccagacatacccctacacctttggcggcggaacaaaggtggaaatcaagggcggatcttctggagagatcgtgctgacacagtctcccgccacactgtcactgtctccaggcgaaagagccacactgagctgtagagccagccagagcgtgtcctcttacctggcctggtatcagcagaagcctggacaggctccccggctgctgatctacgatgccagcaatagagccacaggcatccccgccagattttctggctctggcagcggcaccgatttcaccctgaccataagcagcctggaacctgaggacttcgccgtgtactactgccagcagagaagcaactggcccatcacctttggccagggcaccagactggaaatcaagggaggcggaggatctggcggatctggaagtggcggcggtggatctgcttctggctctggcgaggtgcagctggttgaatctggcggaggactggtgcagcctggcagaagtctgagactgtcttgtgccgccagcggcttcaccttcaacgactatgccatgcactgggtccgacaggcccctggcaaaggacttgaatgggtgtccaccatcagctggaacagcggctctatcggctacgccgattccgtgaagggcagattcaccatctccagagacaacgccaagaagtccctgtacctgcagatgaacagcctgagagccgaggacacagccctgtactactgcgccaaggacatccagtacggcaactactactacggcatggacgtgtggggccagggcacaacagtgacagtctcttctggaggcagctctggccaggttcagctggttcagtctggcgccgaagtgaagaaacctggcgcctctgtgaaggtgtcctgcaaggccagcggctacacctttaccagctactacatccactgggtccgacaggcccctggacaaggactggaatggatcggcagcatctaccccggcaacgtgaacaccaactacaacgagaagttcaaggaccgggccacactgaccgtggacacctctatcagcaccgcctacatggaactgagccggctgagatccgatgataccgccgtgtacttctgcaccagaagccactacggcctggactggaacttcgatgtgtggggccagggcaccaccgtgacagtttcttctgcttctggcggctccggagataagacccacacatgtcctccatgtcctgctccagaagctgctggcggcccttctgtgttcctgtttcctccaaagcctaaggacaccctgatgatcagcagaacccctgaagtgacctgcgtggtggtggatgtgtctcacgaggaccccgaagtgaagttcaattggtacgtggacggcgtggaagtgcacaacgccaagaccaagcctagagaggaacagtacaacagcacctacagagtggtgtccgtgctgaccgtgctgcaccaggattggctgaacggcaaagagtacaagtgcaaggtgtccaacaaggccctggccgctcctatcgagaaaaccatcagcaaggccaagggccagcctagggaaccccaggtttacacccttcctccatgccgggatgagctgaccaagaaccaggtgtccctgtggtgtctcgtgaagggcttctaccccagcgacattgccgtggaatgggagagcaatggccagcctgagaacaactacaagacaacccctcctgtgctggacagcgacggctcattcttcctgtacagcaagctgacagtcgacaagtccagatggcagcagggcaacgtgttcagttgcagcgtgatgcacgaggccctgcacaaccactacacccagaagtccctgagcctgtctcctgga

SEQ ID NO: 599 - protein, 722 aa, synthetic construct
  source 1..722: note = ahCD19xahCD3 L1 Hcc hIgG1LALAPA peptide
DIQLTQSPSFLSASVGDRVTITCKASQSVDYSGDSYLNWYQQKPGKAPKLLIYDASNLVSGVPSRFSGSGSGTEFTLTISSLQPEDFATYYCQQSTENPWTFGGGTKLEIKGGSSGDIQLTQSPSSLSASVGDRVTITCRASQSISYLNWYQQKPGKSPKRWIYDTSKLASGVPSRFSGSGSGTDYTLTISSMQPEDAATYYCQQWSSNPLTFGGGTKVEIKGGGGSGGSGSGGGGSASGSGQVQLVQSGAEVAKPGASVKVSCKASGYTFTRYTMHWVKQAPGQGLEWIGYINPSRGYTNYAQKFQGKATLTTDKSTSTAYMELSSLRSEDTAVYYCARYYDDHYSLDYWGQGTTLTVSSGGSSGQVQLVQSGAEVKKPGSSVKVSCKASGYAFSSYWMNWVRQAPGQGLEWMGQIWPGDSDTNYAQKFQGRVTITADESTSTAYMELSSLRSEDTAVYYCARRETTTVGRYYYAMDYWGQGTTVTVSSASGGSGDKTHTCPPCPAPEAAGGPSVFLFPPKPKDTLMISRTPEVTCVVVDVSHEDPEVKFNWYVDGVEVHNAKTKPREEQYNSTYRVVSVLTVLHQDWLNGKEYKCKVSNKALAAPIEKTISKAKGQPREPQVCTLPPSRDELTKNQVSLSCAVKGFYPSDIAVEWESNGQPENNYKTTPPVLDSDGSFFLVSKLTVDKSRWQQGNVFSCSVMHEALHNHYTQKSLSLSPG

SEQ ID NO: 600 - DNA, 2166 bp, synthetic construct
  source 1..2166: mol_type = other DNA; note = ahCD19xahCD3 L1 Hcc hIgG1LALAPA - DNA
gacatccagctgacccagtctccaagctttctgagcgccagcgtgggcgacagagtgaccatcacatgtaaagccagccagagcgtggactacagcggcgacagctacctgaactggtatcagcagaagcccggcaaggcccctaagctgctgatctacgacgcctccaatctggtgtccggcgtgcccagcagattttctggctctggaagcggcaccgagttcaccctgaccatatctagcctgcagcctgaggacttcgccacctactactgccagcagagcacagagaacccctggacatttggcggcggaacaaagctggaaatcaagggcggcagcagcggcgacatccagctcacacaaagcccttctagcctgtctgccagcgtgggagatcgcgtgaccattacctgcagagcctctcagagcatcagctacctgaactggtatcaacaaaaacccggcaagagcccaaagcggtggatctacgataccagcaagctggcctctggcgtgccctccagattctctggttctggaagcggcaccgactacacactgaccatcagcagcatgcagccagaggatgccgccacatattattgtcagcagtggtccagcaatcccctgaccttcggaggcggaacaaaggtcgagatcaaaggtggcggaggatctggcggaagtggttctggcggtggtggatctgcttctggctctggacaggtgcagctggttcagtctggtgccgaagtggctaaacctggcgcctccgtgaaggtgtcctgtaaagccagcggctacacattcacccggtacaccatgcactgggtcaagcaggctccaggacagggactcgagtggatcggctacatcaaccccagcagaggctacaccaactacgcccagaagttccagggcaaagccactctgaccaccgacaagagcaccagcaccgcctacatggaactgtccagcctgagaagcgaggataccgccgtgtactactgcgcccggtactacgacgatcactacagcctggattactggggccagggcaccacactgacagtgtctagtggcggatctagcggccaggttcagctggttcagtctggcgccgaagtgaagaaacctggcagcagcgtgaaggtgtcctgcaaggcctctggctacgccttcagcagctactggatgaactgggtccgacaggcccctggacaaggcttggaatggatgggccaaatctggcctggcgacagcgacaccaattacgcccagaaattccagggcagagtgaccatcaccgccgacgagtctacaagcaccgcctacatggaactgagcagcctgagaagcgaggacaccgccgtgtactactgtgccagacgggaaaccaccaccgtgggcagatattactacgccatggactactggggccagggcaccacagtgacagtctcttctgctagcggaggttccggagataagacccacacatgtcctccatgtcctgctccagaggctgctggtggcccttccgtgtttctgttccctccaaagcctaaggacaccctgatgatcagcaggacccctgaagtgacctgcgtggtggtggatgtgtctcacgaggacccagaagtgaagttcaattggtacgtggacggcgtggaagtgcacaacgccaagaccaagcctagagaggaacagtacaacagcacctacagagtggtgtccgtgctgaccgtgctgcaccaggattggctgaacggcaaagagtacaagtgcaaggtgtccaacaaggccctggccgctcctatcgagaaaaccatcagcaaggccaagggccagcctcgcgaacctcaagtctgtacactgcctcctagccgggacgagctgaccaagaatcaggtgtcactgagctgcgccgtgaagggcttttaccccagcgacattgccgtggaatgggagagcaatggccagccagagaacaactacaagacaacccctcctgtgctggacagcgacggctcatttttcctggtgtccaagctgacagtggacaagagcagatggcagcagggcaacgtgttcagctgcagcgtgatgcacgaggccctgcacaaccactacacccagaaaagcctgtctctgagccctggc

SEQ ID NO: 601 - protein, 717 aa, synthetic construct
  source 1..717: note = ahCD20_PSxahCD28_Tgcs Kcc hIgG1LALAPA - peptide
DIVLTQSPAILSASPGEKVTMTCRASSSVNYMDWYQKKPGSSPKPWIYATSNLASGVPARFSGSGSGTSYSLTISRVEAEDAATYYCQQWSFNPPTFGGGTKLEIKGGSSGDIQMTQSPSSLSASVGDRVTITCHASQNIYVWLNWYQQKPGKAPKLLIYKASNLHTGVPSRFSGSGSGTDFTLTISSLQPEDFATYYCQQGQTYPYTFGGGTKVEIKGGGGSGGSGSGGGGSASGSGQVQLVQSGAEVKKPGASVKVSCKASGYTFTSYYIHWVRQAPGQGLEWIGSIYPGNVNTNYNEKFKDRATLTVDTSISTAYMELSRLRSDDTAVYFCTRSHYGLDWNFDVWGQGTTVTVSSGGSSGEVQLQQSGAELVKPGASVKMSCKASGYTFTSYNMHWVKQTPGQGLEWIGAIYPGNGDTSYNQKFKGKATLTADKSSSTAYMQLSSLTSEDSADYYCARSNYYGSSYWFFDVWGAGTTVTVSSASGGSGDKTHTCPPCPAPEAAGGPSVFLFPPKPKDTLMISRTPEVTCVVVDVSHEDPEVKFNWYVDGVEVHNAKTKPREEQYNSTYRVVSVLTVLHQDWLNGKEYKCKVSNKALAAPIEKTISKAKGQPREPQVYTLPPCRDELTKNQVSLWCLVKGFYPSDIAVEWESNGQPENNYKTTPPVLDSDGSFFLYSKLTVDKSRWQQGNVFSCSVMHEALHNHYTQKSLSLSPG

SEQ ID NO: 602 - DNA, 2151 bp, synthetic construct
  source 1..2151: mol_type = other DNA; note = ahCD20_PSxahCD28_Tgcs Kcc hIgG1LALAPA - DNA
gacatcgtgctgacacagagccctgccatcctgagtgctagccctggcgagaaagtgaccatgacctgtagagccagcagcagcgtgaactacatggactggtatcagaagaagcccggcagcagccccaagccttggatctacgccacaagcaatctggccagcggagtgcctgccagattttctggctctggcagcggcacaagctacagcctgacaatcagcagagtggaagccgaggatgccgccacctactactgtcagcagtggtccttcaatcctcctaccttcggcggaggcaccaagctggaaatcaaaggcggatcttctggagacatccagatgacacagagccctagcagcctgtctgccagcgtgggagacagagtgaccatcacatgtcacgccagccagaacatctacgtgtggctgaactggtatcagcagaagcccggcaaggcccctaagctgctgatctacaaggccagcaatctgcacaccggcgtgcccagcagattttctggctctggcagcggcaccgacttcaccctgaccatatctagcctgcagcctgaggacttcgccacctactattgtcagcagggccagacatacccctacacctttggcggcggaacaaaggtggaaatcaagggaggcggaggatctggcggatctggaagtggcggcggtggatctgcttctggctctggccaggttcagctggttcagtctggcgccgaagtgaagaaacctggcgcctctgtgaaggtgtcctgcaaggccagcggctacacctttaccagctactacatccactgggtccgacaggcccctggacaaggactggaatggatcggcagcatctaccccggcaacgtgaacaccaactacaacgagaagttcaaggaccgggccacactgaccgtggacacctctatcagcaccgcctacatggaactgagccggctgagatccgatgataccgccgtgtacttctgcaccagaagccactacggcctggactggaacttcgatgtgtggggccagggcaccaccgtgacagtttcttctggaggcagctctggcgaggtgcagcttcagcaaagcggagccgaactggtcaaacctggcgcaagcgtgaagatgtcttgcaaggcctctggctacacctttacgagctacaacatgcattgggttaagcagacccctggccaaggacttgagtggatcggcgccatctatcccggcaatggcgacacctcctacaatcagaagtttaaaggcaaggctaccctcaccgccgacaagagcagctctaccgcttatatgcagctgagcagcctgacctccgaggactccgccgattactactgtgccagaagcaactactacggctcctcctactggttcttcgacgtgtggggagccggcacaacagtgactgtgtctagcgcttctggcggctccggagataagacccacacatgtcctccatgtcctgctccagaagctgctggcggcccttctgtgttcctgtttcctccaaagcctaaggacaccctgatgatcagcagaacccctgaagtgacctgcgtggtggtggatgtgtctcacgaggaccccgaagtgaagttcaattggtacgtggacggcgtggaagtgcacaacgccaagaccaagcctagagaggaacagtacaacagcacctacagagtggtgtccgtgctgaccgtgctgcaccaggattggctgaacggcaaagagtacaagtgcaaggtgtccaacaaggccctggccgctcctatcgagaaaaccatcagcaaggccaagggccagcctagggaaccccaggtttacacccttcctccatgccgggatgagctgaccaagaaccaggtgtccctgtggtgtctcgtgaagggcttctaccccagcgacattgccgtggaatgggagagcaatggccagcctgagaacaactacaagacaacccctcctgtgctggacagcgacggctcattcttcctgtacagcaagctgacagtcgacaagtccagatggcagcagggcaacgtgttcagttgcagcgtgatgcacgaggccctgcacaaccactacacccagaagtccctgagcctgtctcctgga

SEQ ID NO: 603 - protein, 717 aa, synthetic construct
  source 1..717: note = ahCD28_TgcsxahCD20_PS Kcc hIgG1LALAPA - peptide
DIQMTQSPSSLSASVGDRVTITCHASQNIYVWLNWYQQKPGKAPKLLIYKASNLHTGVPSRFSGSGSGTDFTLTISSLQPEDFATYYCQQGQTYPYTFGGGTKVEIKGGSSGDIVLTQSPAILSASPGEKVTMTCRASSSVNYMDWYQKKPGSSPKPWIYATSNLASGVPARFSGSGSGTSYSLTISRVEAEDAATYYCQQWSFNPPTFGGGTKLEIKGGGGSGGSGSGGGGSASGSGEVQLQQSGAELVKPGASVKMSCKASGYTFTSYNMHWVKQTPGQGLEWIGAIYPGNGDTSYNQKFKGKATLTADKSSSTAYMQLSSLTSEDSADYYCARSNYYGSSYWFFDVWGAGTTVTVSSGGSSGQVQLVQSGAEVKKPGASVKVSCKASGYTFTSYYIHWVRQAPGQGLEWIGSIYPGNVNTNYNEKFKDRATLTVDTSISTAYMELSRLRSDDTAVYFCTRSHYGLDWNFDVWGQGTTVTVSSASGGSGDKTHTCPPCPAPEAAGGPSVFLFPPKPKDTLMISRTPEVTCVVVDVSHEDPEVKFNWYVDGVEVHNAKTKPREEQYNSTYRVVSVLTVLHQDWLNGKEYKCKVSNKALAAPIEKTISKAKGQPREPQVYTLPPCRDELTKNQVSLWCLVKGFYPSDIAVEWESNGQPENNYKTTPPVLDSDGSFFLYSKLTVDKSRWQQGNVFSCSVMHEALHNHYTQKSLSLSPG

SEQ ID NO: 604 - DNA, 2151 bp, synthetic construct
  source 1..2151: mol_type = other DNA; note = ahCD28_TgcsxahCD20_PS Kcc hIgG1LALAPA - DNA
gacatccagatgacacagagccctagcagcctgtctgccagcgtgggagacagagtgaccatcacatgtcacgccagccagaacatctacgtgtggctgaactggtatcagcagaagcccggcaaggcccctaagctgctgatctacaaggccagcaatctgcacaccggcgtgcccagcagattttctggctctggcagcggcaccgacttcaccctgaccatatctagcctgcagcctgaggacttcgccacctactattgtcagcagggccagacatacccctacacctttggcggcggaacaaaggtggaaatcaagggcggatcttctggagacatcgtgctgacacagagccctgccatcctgagtgctagccctggcgagaaagtgaccatgacctgtagagccagcagcagcgtgaactacatggactggtatcagaagaagcccggcagcagccccaagccttggatctacgccacaagcaatctggccagcggagtgcctgccagattttctggctctggcagcggcacaagctacagcctgacaatcagcagagtggaagccgaggatgccgccacctactactgtcagcagtggtccttcaatcctcctaccttcggcggaggcaccaagctggaaatcaaaggaggcggaggatctggcggatctggaagtggcggcggtggatctgcttctggctctggcgaggtgcagcttcagcaaagcggagccgaactggtcaaacctggcgcaagcgtgaagatgtcttgcaaggcctctggctacacctttacgagctacaacatgcattgggttaagcagacccctggccaaggacttgagtggatcggcgccatctatcccggcaatggcgacacctcctacaatcagaagtttaaaggcaaggctaccctcaccgccgacaagagcagctctaccgcttatatgcagctgagcagcctgacctccgaggactccgccgattactactgtgccagaagcaactactacggctcctcctactggttcttcgacgtgtggggagccggcacaacagtgactgtgtctagcggaggcagctctggccaggttcagctggttcagtctggcgccgaagtgaagaaacctggcgcctctgtgaaggtgtcctgcaaggccagcggctacacctttaccagctactacatccactgggtccgacaggcccctggacaaggactggaatggatcggcagcatctaccccggcaacgtgaacaccaactacaacgagaagttcaaggaccgggccacactgaccgtggacacctctatcagcaccgcctacatggaactgagccggctgagatccgatgataccgccgtgtacttctgcaccagaagccactacggcctggactggaacttcgatgtgtggggccagggcaccaccgtgacagtttcttctgcttctggcggctccggagataagacccacacatgtcctccatgtcctgctccagaagctgctggcggcccttctgtgttcctgtttcctccaaagcctaaggacaccctgatgatcagcagaacccctgaagtgacctgcgtggtggtggatgtgtctcacgaggaccccgaagtgaagttcaattggtacgtggacggcgtggaagtgcacaacgccaagaccaagcctagagaggaacagtacaacagcacctacagagtggtgtccgtgctgaccgtgctgcaccaggattggctgaacggcaaagagtacaagtgcaaggtgtccaacaaggccctggccgctcctatcgagaaaaccatcagcaaggccaagggccagcctagggaaccccaggtttacacccttcctccatgccgggatgagctgaccaagaaccaggtgtccctgtggtgtctcgtgaagggcttctaccccagcgacattgccgtggaatgggagagcaatggccagcctgagaacaactacaagacaacccctcctgtgctggacagcgacggctcattcttcctgtacagcaagctgacagtcgacaagtccagatggcagcagggcaacgtgttcagttgcagcgtgatgcacgaggccctgcacaaccactacacccagaagtccctgagcctgtctcctgga

SEQ ID NO: 605 - protein, 714 aa, synthetic construct
  source 1..714: note = ahCD28_TgcsxahCD3 L5 Hcc hIgG1LALAPA - peptide
DIQMTQSPSSLSASVGDRVTITCHASQNIYVWLNWYQQKPGKAPKLLIYKASNLHTGVPSRFSGSGSGTDFTLTISSLQPEDFATYYCQQGQTYPYTFGGGTKVEIKGGGGSDIQLTQSPSSLSASVGDRVTITCRASQSISYLNWYQQKPGKSPKRWIYDTSKLASGVPSRFSGSGSGTDYTLTISSMQPEDAATYYCQQWSSNPLTFGGGTKVEIKGGGGSGGSGSGGGGSASGSGQVQLVQSGAEVAKPGASVKVSCKASGYTFTRYTMHWVKQAPGQGLEWIGYINPSRGYTNYAQKFQGKATLTTDKSTSTAYMELSSLRSEDTAVYYCARYYDDHYSLDYWGQGTTLTVSSGGGGSQVQLVQSGAEVKKPGASVKVSCKASGYTFTSYYIHWVRQAPGQGLEWIGSIYPGNVNTNYNEKFKDRATLTVDTSISTAYMELSRLRSDDTAVYFCTRSHYGLDWNFDVWGQGTTVTVSSASGGSGDKTHTCPPCPAPEAAGGPSVFLFPPKPKDTLMISRTPEVTCVVVDVSHEDPEVKFNWYVDGVEVHNAKTKPREEQYNSTYRVVSVLTVLHQDWLNGKEYKCKVSNKALAAPIEKTISKAKGQPREPQVCTLPPSRDELTKNQVSLSCAVKGFYPSDIAVEWESNGQPENNYKTTPPVLDSDGSFFLVSKLTVDKSRWQQGNVFSCSVMHEALHNHYTQKSLSLSPG

SEQ ID NO: 606 - DNA, 2142 bp, synthetic construct
  source 1..2142: mol_type = other DNA; note = ahCD28_TgcsxahCD3 L5 Hcc hIgG1LALAPA - DNA
gacatccagatgacacagagccctagcagcctgtctgccagcgtgggagacagagtgaccatcacatgtcacgccagccagaacatctacgtgtggctgaactggtatcagcagaagcccggcaaggcccctaagctgctgatctacaaggccagcaatctgcacaccggcgtgcccagcagattttctggctctggcagcggcaccgacttcaccctgaccatatctagcctgcagcctgaggacttcgccacctactattgtcagcagggccagacatacccctacacctttggcggcggaacaaaggtggaaatcaagggaggcggtggatctgacatccagctgacacagagcccttctagcctgtctgccagcgtgggcgacagagtgaccatcacatgtagagccagccagagcatcagctacctgaactggtatcagcagaagcccggcaagagccccaagcggtggatctacgatacaagcaagctggcctctggcgtgcccagcagattttctggctctggcagcggcaccgactacaccctgacaatcagcagcatgcagcctgaggatgccgccacctactactgccagcagtggtccagcaatcccctgacatttggcggaggcaccaaggtggaaatcaagggtggcggaggaagcggcggatcaggatctggcggcggaggatctgctagcggatctggacaggttcagctggttcagtctggcgccgaagtggctaaacctggcgcctccgtgaaggtgtcctgtaaagccagcggctacacattcacccggtacaccatgcactgggtcaagcaggctccaggacaaggcttggagtggatcggctacatcaaccctagccggggctacaccaattacgcccagaagttccagggcaaggccacactgaccaccgacaagagcacaagcaccgcctacatggaactgagcagcctgagaagcgaggacaccgccgtgtactactgtgcccggtactacgacgaccactacagcctggattattggggccagggcacaaccctgaccgtgtcatctggaggcggtggatctcaggttcagctggttcagtctggcgccgaagtgaagaaacctggcgcctctgtgaaggtgtcctgcaaggccagcggctacacctttaccagctactacatccactgggtccgacaggcccctggacaaggactggaatggatcggcagcatctaccccggcaacgtgaacaccaactacaacgagaagttcaaggaccgggccacactgaccgtggacacctctatcagcaccgcctacatggaactgagccggctgagatccgatgataccgccgtgtacttctgcaccagaagccactacggcctggactggaacttcgatgtgtggggccagggcaccaccgtgacagtttcttctgcttctggaggctccggagataagacccacacatgtcctccatgtcctgctccagaggctgctggtggcccttccgtgtttctgttccctccaaagcctaaggacaccctgatgatcagcaggacccctgaagtgacctgcgtggtggtggatgtgtctcacgaggacccagaagtgaagttcaattggtacgtggacggcgtggaagtgcacaacgccaagaccaagcctagagaggaacagtacaacagcacctacagagtggtgtccgtgctgaccgtgctgcaccaggattggctgaacggcaaagagtacaagtgcaaggtgtccaacaaggccctggccgctcctatcgagaaaaccatcagcaaggccaagggccagcctcgcgaacctcaagtctgtacactgcctcctagccgggacgagctgaccaagaatcaggtgtcactgagctgcgccgtgaagggcttttaccccagcgacattgccgtggaatgggagagcaatggccagccagagaacaactacaagacaacccctcctgtgctggacagcgacggctcatttttcctggtgtccaagctgacagtggacaagagcagatggcagcagggcaacgtgttcagctgcagcgtgatgcacgaggccctgcacaaccactacacccagaaaagcctgtctctgagccctggc

SEQ ID NO: 607 - protein, 5 aa, synthetic construct
  source 1..5: note = AA linker
GGSGG

SEQ ID NO: 608 - protein, 724 aa, synthetic construct
  source 1..724: note = GloCD20biL8 Kcc hIgG1LALAPA peptide
DIVMTQTPLSLPVTPGEPASISCRSSKSLLHSNGITYLYWYLQKPGQSPQLLIYQMSNLVSGVPDRFSGSGSGTDFTLKISRVEAEDVGVYYCAQNLELPYTFGGGTKVEIKGGSGGDIVMTQTPLSLPVTPGEPASISCRSSKSLLHSNGITYLYWYLQKPGQSPQLLIYQMSNLVSGVPDRFSGSGSGTDFTLKISRVEAEDVGVYYCAQNLELPYTFGGGTKVEIKGSGGSAGSGSGGGGSASGSGQVQLVQSGAEVKKPGSSVKVSCKASGYAFSYSWINWVRQAPGQGLEWMGRIFPGDGDTDYNGKFKGRVTITADKSTSTAYMELSSLRSEDTAVYYCARNVFDGYWLVYWGQGTLVTVSSGGSGGQVQLVQSGAEVKKPGSSVKVSCKASGYAFSYSWINWVRQAPGQGLEWMGRIFPGDGDTDYNGKFKGRVTITADKSTSTAYMELSSLRSEDTAVYYCARNVFDGYWLVYWGQGTLVTVSSASGGSGDKTHTCPPCPAPEAAGGPSVFLFPPKPKDTLMISRTPEVTCVVVDVSHEDPEVKFNWYVDGVEVHNAKTKPREEQYNSTYRVVSVLTVLHQDWLNGKEYKCKVSNKALAAPIEKTISKAKGQPREPQVYTLPPCRDELTKNQVSLWCLVKGFYPSDIAVEWESNGQPENNYKTTPPVLDSDGSFFLYSKLTVDKSRWQQGNVFSCSVMHEALHNHYTQKSLSLSPG

SEQ ID NO: 609 - skipped

SEQ ID NO: 610 - protein, 727 aa, synthetic construct
  source 1..727: note = GloCD3CD20L8 Hcc hIgG1LALAPA peptide
QAVVTQEPSLTVSPGGTVTLTCGSSTGAVTTSNYANWVQEKPGQAFRGLIGGTNKRAPGTPARFSGSLLGGKAALTLSGAQPEDEAEYYCALWYSNLWVFGGGTKLTVLGGSGGDIVMTQTPLSLPVTPGEPASISCRSSKSLLHSNGITYLYWYLQKPGQSPQLLIYQMSNLVSGVPDRFSGSGSGTDFTLKISRVEAEDVGVYYCAQNLELPYTFGGGTKVEIKGSGGSAGSGSGGGGSASGSGQVQLVQSGAEVKKPGSSVKVSCKASGYAFSYSWINWVRQAPGQGLEWMGRIFPGDGDTDYNGKFKGRVTITADKSTSTAYMELSSLRSEDTAVYYCARNVFDGYWLVYWGQGTLVTVSSGGSGGEVQLLESGGGLVQPGGSLRLSCAASGFTFSTYAMNWVRQAPGKGLEWVSRIRSKYNNYATYYADSVKGRFTISRDDSKNTLYLQMNSLRAEDTAVYYCVRHGNFGNSYVSWFAYWGQGTLVTVSSASGGSGDKTHTCPPCPAPEAAGGPSVFLFPPKPKDTLMISRTPEVTCVVVDVSHEDPEVKFNWYVDGVEVHNAKTKPREEQYNSTYRVVSVLTVLHQDWLNGKEYKCKVSNKALAAPIEKTISKAKGQPREPQVCTLPPSRDELTKNQVSLSCAVKGFYPSDIAVEWESNGQPENNYKTTPPVLDSDGSFFLVSKLTVDKSRWQQGNVFSCSVMHEALHNHYTQKSLSLSPG

SEQ ID NO: 611 - DNA, 2181 bp, synthetic construct
  source 1..2181: mol_type = other DNA; note = GloCD3CD20L8 Hcc hIgG1LALAPA - DNA
caggccgtggttacacaagagccttctctgaccgtgtctcctggcggcacagtgacactgacatgtggcagttctacaggcgccgtgaccaccagcaattacgccaactgggtgcaagagaagccaggccaggccttcagaggactgatcggcggcacaaacaagagagcccctggaacaccagccagattcagcggatctctgctcggaggaaaggccgcactgacactgtctggtgcccagcctgaagatgaggccgagtactattgcgccctgtggtacagcaacctgtgggttttcggaggcggcaccaagctgacagtgcttggcggatctggcggcgacatcgtgatgacccagacacctctgagcctgcctgtgacacctggcgaacctgccagcatcagctgcagaagcagcaagagcctgctgcacagcaacggcatcacctacctgtactggtatctgcagaaacccggccagtctcctcagctgctgatctaccagatgagcaacctggtgtccggcgtgcccgatagattttctggcagcggctctggcaccgacttcaccctgaagattagcagagtggaagccgaggacgtgggcgtgtactactgtgcccagaacctggaactgccctacacctttggcggaggcaccaaggtggaaatcaaaggttctggcggcagcgccggaagtggtagtggtggcggaggatctgcttctggctctggacaggttcagctggttcagtctggcgccgaagtgaagaaacctggcagcagcgtgaaggtgtcctgcaaggcctctggctacgccttcagctacagctggatcaactgggtccgacaggcccctggacaaggcttggaatggatgggcagaatcttccccggcgacggcgacaccgattacaacggcaagttcaagggcagagtgaccatcaccgccgacaagagcacaagcaccgcctacatggaactgagcagcctgagaagcgaggacaccgccgtgtactactgcgccagaaacgtgttcgacggctactggctggtgtattggggccagggaacactggtcacagtgtccagcggcggaagcggaggagaagtgcagctgctggaatctggcggaggactggttcaacctggcggctctctgagactgtcttgtgccgccagcggcttcacctttagcacctacgccatgaactgggtccgacaggcccctggcaaaggccttgaatgggtgtcccggatcagaagcaagtacaacaactacgccacctactacgccgacagcgtgaagggcagattcaccatcagccgggacgacagcaagaacaccctgtacctgcagatgaacagcctgagagccgaggacaccgccgtgtactattgtgtgcggcacggcaacttcggcaacagctatgtgtcttggtttgcctactggggccagggcacactggtcacagttagctctgcttctggaggctccggagataagacccacacatgtcctccatgtcctgctccagaggctgctggtggcccttccgtgtttctgttccctccaaagcctaaggacaccctgatgatcagcaggacccctgaagtgacctgcgtggtggtggatgtgtctcacgaggacccagaagtgaagttcaattggtacgtggacggcgtggaagtgcacaacgccaagaccaagcctagagaggaacagtacaacagcacctacagagtggtgtccgtgctgaccgtgctgcaccaggattggctgaacggcaaagagtacaagtgcaaggtgtccaacaaggccctggccgctcctatcgagaaaaccatcagcaaggccaagggccagcctcgcgaacctcaagtctgtacactgcctcctagccgggacgagctgaccaagaatcaggtgtcactgagctgcgccgtgaagggcttttaccccagcgacattgccgtggaatgggagagcaatggccagccagagaacaactacaagacaacccctcctgtgctggacagcgacggctcatttttcctggtgtccaagctgacagtggacaagagcagatggcagcagggcaacgtgttcagctgcagcgtgatgcacgaggccctgcacaaccactacacccagaaaagcctgtctctgagccctggc

SEQ ID NO: 612 - protein, 727 aa, synthetic construct
  source 1..727: note = GloCD20CD3L8 Hcc hIgG1LALAPA peptide
DIVMTQTPLSLPVTPGEPASISCRSSKSLLHSNGITYLYWYLQKPGQSPQLLIYQMSNLVSGVPDRFSGSGSGTDFTLKISRVEAEDVGVYYCAQNLELPYTFGGGTKVEIKGGSGGQAVVTQEPSLTVSPGGTVTLTCGSSTGAVTTSNYANWVQEKPGQAFRGLIGGTNKRAPGTPARFSGSLLGGKAALTLSGAQPEDEAEYYCALWYSNLWVFGGGTKLTVLGSGGSAGSGSGGGGSASGSGEVQLLESGGGLVQPGGSLRLSCAASGFTFSTYAMNWVRQAPGKGLEWVSRIRSKYNNYATYYADSVKGRFTISRDDSKNTLYLQMNSLRAEDTAVYYCVRHGNFGNSYVSWFAYWGQGTLVTVSSGGSGGQVQLVQSGAEVKKPGSSVKVSCKASGYAFSYSWINWVRQAPGQGLEWMGRIFPGDGDTDYNGKFKGRVTITADKSTSTAYMELSSLRSEDTAVYYCARNVFDGYWLVYWGQGTLVTVSSASGGSGDKTHTCPPCPAPEAAGGPSVFLFPPKPKDTLMISRTPEVTCVVVDVSHEDPEVKFNWYVDGVEVHNAKTKPREEQYNSTYRVVSVLTVLHQDWLNGKEYKCKVSNKALAAPIEKTISKAKGQPREPQVCTLPPSRDELTKNQVSLSCAVKGFYPSDIAVEWESNGQPENNYKTTPPVLDSDGSFFLVSKLTVDKSRWQQGNVFSCSVMHEALHNHYTQKSLSLSPG

SEQ ID NO: 613 - DNA, 2181 bp, synthetic construct
  source 1..2181: mol_type = other DNA; note = GloCD20CD3L8 Hcc hIgG1LALAPA - DNA
gacatcgtgatgacccagacacctctgagcctgcctgtgacacctggcgaacctgccagcatcagctgcagaagcagcaagagcctgctgcacagcaacggcatcacctacctgtactggtatctgcagaaacccggccagtctcctcagctgctgatctaccagatgagcaacctggtgtccggcgtgcccgatagattttctggcagcggctctggcaccgacttcaccctgaagattagcagagtggaagccgaggacgtgggcgtgtactactgtgcccagaacctggaactgccctacacctttggcggaggcaccaaggtggaaatcaaaggcggatctggcggccaggccgtggttacacaagagccttctctgaccgtgtctcctggcggcacagtgacactgacatgtggcagttctacaggcgccgtgaccaccagcaattacgccaactgggtgcaagagaagccaggccaggccttcagaggactgatcggcggcacaaacaagagagcccctggaacaccagccagattcagcggatctctgctcggaggaaaggccgcactgacactgtctggtgcccagcctgaagatgaggccgagtactattgcgccctgtggtacagcaacctgtgggttttcggaggcggcaccaagctgacagtgcttggttctggcggcagcgccggaagtggtagtggtggcggaggatctgcttctggctctggagaagtgcagctgctggaatctggcggaggactggttcaacctggcggctctctgagactgtcttgtgccgccagcggcttcacctttagcacctacgccatgaactgggtccgacaggcccctggcaaaggccttgaatgggtgtcccggatcagaagcaagtacaacaactacgccacctactacgccgacagcgtgaagggcagattcaccatcagccgggacgacagcaagaacaccctgtacctgcagatgaacagcctgagagccgaggacaccgccgtgtactattgtgtgcggcacggcaacttcggcaacagctatgtgtcttggtttgcctactggggccagggcacactggtcacagttagctctggcggaagcggaggacaggttcagctggttcagtctggcgccgaagtgaagaaacctggcagcagcgtgaaggtgtcctgcaaggcctctggctacgccttcagctacagctggatcaactgggtccgacaggcccctggacaaggcttggaatggatgggcagaatcttccccggcgacggcgacaccgattacaacggcaagttcaagggcagagtgaccatcaccgccgacaagagcacaagcaccgcctacatggaactgagcagcctgagaagcgaggacaccgccgtgtactactgcgccagaaacgtgttcgacggctactggctggtgtattggggccagggaacactggtcacagtgtccagcgcttctggaggctccggagataagacccacacatgtcctccatgtcctgctccagaggctgctggtggcccttccgtgtttctgttccctccaaagcctaaggacaccctgatgatcagcaggacccctgaagtgacctgcgtggtggtggatgtgtctcacgaggacccagaagtgaagttcaattggtacgtggacggcgtggaagtgcacaacgccaagaccaagcctagagaggaacagtacaacagcacctacagagtggtgtccgtgctgaccgtgctgcaccaggattggctgaacggcaaagagtacaagtgcaaggtgtccaacaaggccctggccgctcctatcgagaaaaccatcagcaaggccaagggccagcctcgcgaacctcaagtctgtacactgcctcctagccgggacgagctgaccaagaatcaggtgtcactgagctgcgccgtgaagggcttttaccccagcgacattgccgtggaatgggagagcaatggccagccagagaacaactacaagacaacccctcctgtgctggacagcgacggctcatttttcctggtgtccaagctgacagtggacaagagcagatggcagcagggcaacgtgttcagctgcagcgtgatgcacgaggccctgcacaaccactacacccagaaaagcctgtctctgagccctggc

SEQ ID NO: 614 - protein, 448 aa, synthetic construct
  source 1..448: note = GLoCD20H Kcc hIgG1LALAPA peptide
QVQLVQSGAEVKKPGSSVKVSCKASGYAFSYSWINWVRQAPGQGLEWMGRIFPGDGDTDYNGKFKGRVTITADKSTSTAYMELSSLRSEDTAVYYCARNVFDGYWLVYWGQGTLVTVSSASTKGPSVFPLAPSSKSTSGGTAALGCLVKDYFPEPVTVSWNSGALTSGVHTFPAVLQSSGLYSLSSVVTVPSSSLGTQTYICNVNHKPSNTKVDKKVEPKSCDKTHTCPPCPAPEAAGGPSVFLFPPKPKDTLMISRTPEVTCVVVDVSHEDPEVKFNWYVDGVEVHNAKTKPREEQYNSTYRVVSVLTVLHQDWLNGKEYKCKVSNKALAAPIEKTISKAKGQPREPQVYTLPPCRDELTKNQVSLWCLVKGFYPSDIAVEWESNGQPENNYKTTPPVLDSDGSFFLYSKLTVDKSRWQQGNVFSCSVMHEALHNHYTQKSLSLSPG

SEQ ID NO: 615 - DNA, 1344 bp, synthetic construct
  source 1..1344: mol_type = other DNA; note = GLoCD20H Kcc hIgG1LALAPA - DNA
caggttcagctggttcagtctggcgccgaagtgaagaaacctggcagcagcgtgaaggtgtcctgcaaggcctctggctacgccttcagctacagctggatcaactgggtccgacaggcccctggacaaggcttggaatggatgggcagaatcttccccggcgacggcgacaccgattacaacggcaagttcaagggcagagtgaccatcaccgccgacaagagcacaagcaccgcctacatggaactgagcagcctgagaagcgaggacaccgccgtgtactactgcgccagaaacgtgttcgacggctactggctggtgtattggggccagggaacactggtcacagtgtccagcgcttcgaccaagggcccatccgtgtttcctctggctcccagcagcaagtctacaagcggaggaacagccgctctgggctgcctggtcaaggattactttcccgagcctgtgaccgtgtcctggaattctggcgctctgacaagcggcgtgcacacctttccagctgtgctgcaaagcagcggcctgtactctctgagcagcgtggtcacagtgcctagctctagcctgggcacccagacctacatctgcaatgtgaaccacaagcctagcaacaccaaggtggacaagaaggtggaacccaagagctgcgataagacccacacatgtcctccatgtcctgctccagaagctgctggcggcccttctgtgttcctgtttcctccaaagcctaaggacaccctgatgatcagcagaacccctgaagtgacctgcgtggtggtggatgtgtctcacgaggaccccgaagtgaagttcaattggtacgtggacggcgtggaagtgcacaacgccaagaccaagcctagagaggaacagtacaacagcacctacagagtggtgtccgtgctgaccgtgctgcaccaggattggctgaacggcaaagagtacaagtgcaaggtgtccaacaaggccctggccgctcctatcgagaaaaccatcagcaaggccaagggccagcctagggaaccccaggtttacacccttcctccatgccgggatgagctgaccaagaaccaggtgtccctgtggtgtctcgtgaagggcttctaccccagcgacattgccgtggaatgggagagcaatggccagcctgagaacaactacaagacaacccctcctgtgctggacagcgacggctcattcttcctgtacagcaagctgacagtcgacaagtccagatggcagcagggcaacgtgttcagttgcagcgtgatgcacgaggccctgcacaaccactacacccagaagtccctgagcctgtctcctgga

SEQ ID NO: 616 - protein, 219 aa, synthetic construct
  source 1..219: note = GLoCD20L hKappa - peptide
DIVMTQTPLSLPVTPGEPASISCRSSKSLLHSNGITYLYWYLQKPGQSPQLLIYQMSNLVSGVPDRFSGSGSGTDFTLKISRVEAEDVGVYYCAQNLELPYTFGGGTKVEIKRTVAAPSVFIFPPSDEQLKSGTASVVCLLNNFYPREAKVQWKVDNALQSGNSQESVTEQDSKDSTYSLSSTLTLSKADYEKHKVYACEVTHQGLSSPVTKSFNRGEC

SEQ ID NO: 617 - DNA, 657 bp, synthetic construct
  source 1..657: mol_type = other DNA; note = GLoCD20L hKappa - DNA
gacatcgtgatgacccagacacctctgagcctgcctgtgacacctggcgaacctgccagcatcagctgcagaagcagcaagagcctgctgcacagcaacggcatcacctacctgtactggtatctgcagaaacccggccagtctcctcagctgctgatctaccagatgagcaacctggtgtccggcgtgcccgatagattttctggcagcggctctggcaccgacttcaccctgaagattagcagagtggaagccgaggacgtgggcgtgtactactgtgcccagaacctggaactgccctacacctttggcggaggcaccaaggtggaaatcaagcgtacggtggccgctcccagcgtgttcatcttcccacctagcgacgagcagctgaagtccggcacagcctctgtcgtgtgcctgctgaacaacttctacccccgcgaggccaaagtgcagtggaaggtggacaacgccctgcagagcggcaacagccaggaaagcgtgaccgagcaggacagcaaggactccacctacagcctgagcagcaccctgacactgagcaaggccgactacgagaagcacaaggtgtacgcctgcgaagtgacccaccagggcctgtctagccccgtgaccaagagcttcaaccggggcgagtgt

SEQ ID NO: 618 - protein, 722 aa, synthetic construct
  source 1..722: note = GloCD20TclBCMAL8 Kcc hIgG1LALAPA - peptide
DIVMTQTPLSLPVTPGEPASISCRSSKSLLHSNGITYLYWYLQKPGQSPQLLIYQMSNLVSGVPDRFSGSGSGTDFTLKISRVEAEDVGVYYCAQNLELPYTFGGGTKVEIKGGSGGSYVLTQPPSVSVAPGQTARITCGGNNIGSKSVHWYQQPPGQAPVVVVYDDSDRPSGIPERFSGSNSGNTATLTISRVEAGDEAVYYCQVWDSSSDHVVFGGGTKLTVLGSGGSAGSGSGGGGSASGSGQLQLQESGPGLVKPSETLSLTCTVSGGSISSGSYFWGWIRQPPGKGLEWIGSIYYSGITYYNPSLKSRVTISVDTSKNQFSLKLSSVTAADTAVYYCARHDGAVAGLFDYWGQGTLVTVSSGGSGGQVQLVQSGAEVKKPGSSVKVSCKASGYAFSYSWINWVRQAPGQGLEWMGRIFPGDGDTDYNGKFKGRVTITADKSTSTAYMELSSLRSEDTAVYYCARNVFDGYWLVYWGQGTLVTVSSASGGSGDKTHTCPPCPAPEAAGGPSVFLFPPKPKDTLMISRTPEVTCVVVDVSHEDPEVKFNWYVDGVEVHNAKTKPREEQYNSTYRVVSVLTVLHQDWLNGKEYKCKVSNKALAAPIEKTISKAKGQPREPQVYTLPPCRDELTKNQVSLWCLVKGFYPSDIAVEWESNGQPENNYKTTPPVLDSDGSFFLYSKLTVDKSRWQQGNVFSCSVMHEALHNHYTQKSLSLSPG

SEQ ID NO: 619 - DNA, 2166 bp, synthetic construct
  source 1..2166: mol_type = other DNA; note = GloCD20TclBCMAL8 Kcc hIgG1LALAPA - DNA
gacatcgtgatgacccagacacctctgagcctgcctgtgacacctggcgaacctgccagcatcagctgcagaagcagcaagagcctgctgcacagcaacggcatcacctacctgtactggtatctgcagaaacccggccagtctcctcagctgctgatctaccagatgagcaacctggtgtccggcgtgcccgatagattttctggcagcggctctggcaccgacttcaccctgaagattagcagagtggaagccgaggacgtgggcgtgtactactgtgcccagaacctggaactgccctacacctttggcggaggcaccaaggtggaaatcaagggcggatctggcggcagctacgtgctgacacaacctccatctgtgtctgtggcccctggccagacagccagaattacatgcggcggcaacaacatcggcagcaagtccgtgcattggtatcagcagcctccaggacaggctcctgtggtggtggtgtacgacgacagcgatagacctagcggcatccccgagagattcagcggcagcaatagcggcaataccgccacactgaccatcagcagagttgaggctggcgacgaggccgtgtactattgccaagtgtgggacagcagcagcgatcacgtggtgtttggcggcggaacaaagctgacagtgctcggttctggcggcagcgccggaagtggtagtggtggcggaggatctgcttctggctctggacagctccagctgcaagagtctggccctggactggtcaagcctagcgagacactgagcctgacatgtaccgtgtctggcggcagcatctccagcggctcctatttctggggctggatcagacaacctcctggcaaaggcctggaatggatcggctccatctactacagcggaatcacctactacaaccccagcctgaagtccagagtgaccatctccgtggacaccagcaagaaccagttctccctgaagctgagcagcgtgacagccgccgataccgccgtctattactgcgccagacatgatggcgctgtggccggcctgtttgattattggggacagggcaccctggtcaccgttagcagcggcggaagcggaggacaggttcagctggttcagtctggcgccgaagtgaagaaacctggcagcagcgtgaaggtgtcctgcaaggcctctggctacgccttcagctacagctggatcaactgggtccgacaggcccctggacaaggcttggaatggatgggcagaatcttccccggcgacggcgacaccgattacaacggcaagttcaagggcagagtgaccatcaccgccgacaagagcacaagcaccgcctacatggaactgagcagcctgagaagcgaggacaccgccgtgtactactgcgccagaaacgtgttcgacggctactggctggtgtattggggccagggaacactggtcacagtgtccagcgcttctggaggctccggagataagacccacacatgtcctccatgtcctgctccagaagctgctggcggcccttctgtgttcctgtttcctccaaagcctaaggacaccctgatgatcagcagaacccctgaagtgacctgcgtggtggtggatgtgtctcacgaggaccccgaagtgaagttcaattggtacgtggacggcgtggaagtgcacaacgccaagaccaagcctagagaggaacagtacaacagcacctacagagtggtgtccgtgctgaccgtgctgcaccaggattggctgaacggcaaagagtacaagtgcaaggtgtccaacaaggccctggccgctcctatcgagaaaaccatcagcaaggccaagggccagcctagggaaccccaggtttacacccttcctccatgccgggatgagctgaccaagaaccaggtgtccctgtggtgtctcgtgaagggcttctaccccagcgacattgccgtggaatgggagagcaatggccagcctgagaacaactacaagacaacccctcctgtgctggacagcgacggctcattcttcctgtacagcaagctgacagtcgacaagtccagatggcagcagggcaacgtgttcagttgcagcgtgatgcacgaggccctgcacaaccactacacccagaagtccctgagcctgtctcctgga

SEQ ID NO: 620 - protein, 108 aa, synthetic construct
  source 1..108: note = TclBCMA VL
SYVLTQPPSVSVAPGQTARITCGGNNIGSKSVHWYQQPPGQAPVVVVYDDSDRPSGIPERFSGSNSGNTATLTISRVEAGDEAVYYCQVWDSSSDHVVFGGGTKLTVL

SEQ ID NO: 621 - protein, 11 aa, synthetic construct
  source 1..11: note = TclBCMA LCDR1
GGNNIGSKSVH

SEQ ID NO: 622 - protein, 7 aa, synthetic construct
  source 1..7: note = TclBCMA LCDR2
DDSDRPS

SEQ ID NO: 623 - protein, 11 aa, synthetic construct
  source 1..11: note = TclBCMA LCDR3
QVWDSSSDHVV

SEQ ID NO: 624 - protein, 121 aa, synthetic construct
  source 1..121: note = TclBCMA VH
QLQLQESGPGLVKPSETLSLTCTVSGGSISSGSYFWGWIRQPPGKGLEWIGSIYYSGITYYNPSLKSRVTISVDTSKNQFSLKLSSVTAADTAVYYCARHDGAVAGLFDYWGQGTLVTVSS

SEQ ID NO: 625 - protein, 9 aa, synthetic construct
  source 1..9: note = TclBCMA HCDR1
GGSISSGSY

SEQ ID NO: 626 - protein, 5 aa, synthetic construct
  source 1..5: note = TclBCMA HCDR2
YYSGI

SEQ ID NO: 627 - protein, 11 aa, synthetic construct
  source 1..11: note = TclBCMA HCDR3
HDGAVAGLFDY

SEQ ID NO: 628 - protein, 722 aa, synthetic construct
  source 1..722: note = TclBCMAGloCD20L8 Kcc hIgG1LALAPA - peptide
SYVLTQPPSVSVAPGQTARITCGGNNIGSKSVHWYQQPPGQAPVVVVYDDSDRPSGIPERFSGSNSGNTATLTISRVEAGDEAVYYCQVWDSSSDHVVFGGGTKLTVLGGSGGDIVMTQTPLSLPVTPGEPASISCRSSKSLLHSNGITYLYWYLQKPGQSPQLLIYQMSNLVSGVPDRFSGSGSGTDFTLKISRVEAEDVGVYYCAQNLELPYTFGGGTKVEIKGSGGSAGSGSGGGGSASGSGQVQLVQSGAEVKKPGSSVKVSCKASGYAFSYSWINWVRQAPGQGLEWMGRIFPGDGDTDYNGKFKGRVTITADKSTSTAYMELSSLRSEDTAVYYCARNVFDGYWLVYWGQGTLVTVSSGGSGGQLQLQESGPGLVKPSETLSLTCTVSGGSISSGSYFWGWIRQPPGKGLEWIGSIYYSGITYYNPSLKSRVTISVDTSKNQFSLKLSSVTAADTAVYYCARHDGAVAGLFDYWGQGTLVTVSSASGGSGDKTHTCPPCPAPEAAGGPSVFLFPPKPKDTLMISRTPEVTCVVVDVSHEDPEVKFNWYVDGVEVHNAKTKPREEQYNSTYRVVSVLTVLHQDWLNGKEYKCKVSNKALAAPIEKTISKAKGQPREPQVYTLPPCRDELTKNQVSLWCLVKGFYPSDIAVEWESNGQPENNYKTTPPVLDSDGSFFLYSKLTVDKSRWQQGNVFSCSVMHEALHNHYTQKSLSLSPG

SEQ ID NO: 629 - DNA, 2166 bp, synthetic construct
  source 1..2166: mol_type = other DNA; note = TclBCMAGloCD20L8 Kcc hIgG1LALAPA - DNA
agctacgtgctgacacaacctccatctgtgtctgtggcccctggccagacagccagaattacatgcggcggcaacaacatcggcagcaagtccgtgcattggtatcagcagcctccaggacaggctcctgtggtggtggtgtacgacgacagcgatagacctagcggcatccccgagagattcagcggcagcaatagcggcaataccgccacactgaccatcagcagagttgaggctggcgacgaggccgtgtactattgccaagtgtgggacagcagcagcgatcacgtggtgtttggcggcggaacaaagctgacagtgctcggcggatctggcggcgacatcgtgatgacccagacacctctgagcctgcctgtgacacctggcgaacctgccagcatcagctgcagaagcagcaagagcctgctgcacagcaacggcatcacctacctgtactggtatctgcagaaacccggccagtctcctcagctgctgatctaccagatgagcaacctggtgtccggcgtgcccgatagattttctggcagcggctctggcaccgacttcaccctgaagattagcagagtggaagccgaggacgtgggcgtgtactactgtgcccagaacctggaactgccctacacctttggcggaggcaccaaggtggaaatcaagggttctggcggcagcgccggaagtggtagtggtggcggaggatctgcttctggctctggacaggttcagctggttcagtctggcgccgaagtgaagaaacctggcagcagcgtgaaggtgtcctgcaaggcctctggctacgccttcagctacagctggatcaactgggtccgacaggcccctggacaaggcttggaatggatgggcagaatcttccccggcgacggcgacaccgattacaacggcaagttcaagggcagagtgaccatcaccgccgacaagagcacaagcaccgcctacatggaactgagcagcctgagaagcgaggacaccgccgtgtactactgcgccagaaacgtgttcgacggctactggctggtgtattggggccagggaacactggtcacagtgtccagcggcggaagcggaggacagctccagctgcaagagtctggccctggactggtcaagcctagcgagacactgagcctgacatgtaccgtgtctggcggcagcatctccagcggctcctatttctggggctggatcagacaacctcctggcaaaggcctggaatggatcggctccatctactacagcggaatcacctactacaaccccagcctgaagtccagagtgaccatctccgtggacaccagcaagaaccagttctccctgaagctgagcagcgtgacagccgccgataccgccgtctattactgcgccagacatgatggcgctgtggccggcctgtttgattattggggacagggcaccctggtcaccgttagcagcgcttctggaggctccggagataagacccacacatgtcctccatgtcctgctccagaagctgctggcggcccttctgtgttcctgtttcctccaaagcctaaggacaccctgatgatcagcagaacccctgaagtgacctgcgtggtggtggatgtgtctcacgaggaccccgaagtgaagttcaattggtacgtggacggcgtggaagtgcacaacgccaagaccaagcctagagaggaacagtacaacagcacctacagagtggtgtccgtgctgaccgtgctgcaccaggattggctgaacggcaaagagtacaagtgcaaggtgtccaacaaggccctggccgctcctatcgagaaaaccatcagcaaggccaagggccagcctagggaaccccaggtttacacccttcctccatgccgggatgagctgaccaagaaccaggtgtccctgtggtgtctcgtgaagggcttctaccccagcgacattgccgtggaatgggagagcaatggccagcctgagaacaactacaagacaacccctcctgtgctggacagcgacggctcattcttcctgtacagcaagctgacagtcgacaagtccagatggcagcagggcaacgtgttcagttgcagcgtgatgcacgaggccctgcacaaccactacacccagaagtccctgagcctgtctcctgga

SEQ ID NO: 630 - protein, 723 aa, synthetic construct
  source 1..723: note = GloCD3CD28L8 Hcc hIgG1LALAPA peptide
QAVVTQEPSLTVSPGGTVTLTCGSSTGAVTTSNYANWVQEKPGQAFRGLIGGTNKRAPGTPARFSGSLLGGKAALTLSGAQPEDEAEYYCALWYSNLWVFGGGTKLTVLGGSGGDIQMTQSPSSLSASVGDRVTITCHASQNIYVWLNWYQQKPGKAPKLLIYKASNLHTGVPSRFSGSGSGTDFTLTISSLQPEDFATYYCQQGQTYPYTFGGGTKVEIKGSGGSAGSGSGGGGSASGSGQVQLVQSGAEVKKPGASVKVSCKASGYTFTSYYIHWVRQAPGQGLEWIGSIYPGNVNTNYNEKFKDRATLTVDTSISTAYMELSRLRSDDTAVYFCTRSHYGLDWNFDVWGQGTTVTVSSGGSGGEVQLLESGGGLVQPGGSLRLSCAASGFTFSTYAMNWVRQAPGKGLEWVSRIRSKYNNYATYYADSVKGRFTISRDDSKNTLYLQMNSLRAEDTAVYYCVRHGNFGNSYVSWFAYWGQGTLVTVSSASGGSGDKTHTCPPCPAPEAAGGPSVFLFPPKPKDTLMISRTPEVTCVVVDVSHEDPEVKFNWYVDGVEVHNAKTKPREEQYNSTYRVVSVLTVLHQDWLNGKEYKCKVSNKALAAPIEKTISKAKGQPREPQVCTLPPSRDELTKNQVSLSCAVKGFYPSDIAVEWESNGQPENNYKTTPPVLDSDGSFFLVSKLTVDKSRWQQGNVFSCSVMHEALHNHYTQKSLSLSPG

SEQ ID NO: 631 - DNA, 2169 bp, synthetic construct
  source 1..2169: mol_type = other DNA; note = GloCD3CD28L8 Hcc hIgG1LALAPA - DNA
caggccgtggttacacaagagccttctctgaccgtgtctcctggcggcacagtgacactgacatgtggcagttctacaggcgccgtgaccaccagcaattacgccaactgggtgcaagagaagccaggccaggccttcagaggactgatcggcggcacaaacaagagagcccctggaacaccagccagattcagcggatctctgctcggaggaaaggccgcactgacactgtctggtgcccagcctgaagatgaggccgagtactattgcgccctgtggtacagcaacctgtgggttttcggaggcggcaccaagctgacagtgcttggcggatctggcggcgacatccagatgacacagagccctagcagcctgtctgccagcgtgggagacagagtgaccatcacatgtcacgccagccagaacatctacgtgtggctgaactggtatcagcagaagcccggcaaggcccctaagctgctgatctacaaggccagcaatctgcacaccggcgtgcccagcagattttctggctctggcagcggcaccgacttcaccctgaccatatctagcctgcagcctgaggacttcgccacctactattgtcagcagggccagacatacccctacacctttggcggcggaacaaaggtggaaatcaagggttctggcggcagcgccggaagtggtagtggtggcggaggatctgcttctggctctggacaggttcagctggttcagtctggcgccgaagtgaagaaacctggcgcctctgtgaaggtgtcctgcaaggccagcggctacacctttaccagctactacatccactgggtccgacaggcccctggacaaggactggaatggatcggcagcatctaccccggcaacgtgaacaccaactacaacgagaagttcaaggaccgggccacactgaccgtggacacctctatcagcaccgcctacatggaactgagccggctgagatccgatgataccgccgtgtacttctgcaccagaagccactacggcctggactggaacttcgatgtgtggggccagggcaccaccgtgacagtttcttctggcggaagcggaggagaagtgcagctgctggaatctggcggaggactggttcaacctggcggctctctgagactgtcttgtgccgccagcggcttcacctttagcacctacgccatgaactgggtccgacaggcccctggcaaaggccttgaatgggtgtcccggatcagaagcaagtacaacaactacgccacctactacgccgacagcgtgaagggcagattcaccatcagccgggacgacagcaagaacaccctgtacctgcagatgaacagcctgagagccgaggacaccgccgtgtactattgtgtgcggcacggcaacttcggcaacagctatgtgtcttggtttgcctactggggccagggcacactggtcacagttagctctgcttctggaggctccggagataagacccacacatgtcctccatgtcctgctccagaggctgctggtggcccttccgtgtttctgttccctccaaagcctaaggacaccctgatgatcagcaggacccctgaagtgacctgcgtggtggtggatgtgtctcacgaggacccagaagtgaagttcaattggtacgtggacggcgtggaagtgcacaacgccaagaccaagcctagagaggaacagtacaacagcacctacagagtggtgtccgtgctgaccgtgctgcaccaggattggctgaacggcaaagagtacaagtgcaaggtgtccaacaaggccctggccgctcctatcgagaaaaccatcagcaaggccaagggccagcctcgcgaacctcaagtctgtacactgcctcctagccgggacgagctgaccaagaatcaggtgtcactgagctgcgccgtgaagggcttttaccccagcgacattgccgtggaatgggagagcaatggccagccagagaacaactacaagacaacccctcctgtgctggacagcgacggctcatttttcctggtgtccaagctgacagtggacaagagcagatggcagcagggcaacgtgttcagctgcagcgtgatgcacgaggccctgcacaaccactacacccagaaaagcctgtctctgagccctggc

SEQ ID NO: 632 - protein, 723 aa, synthetic construct
  source 1..723: note = hAhCD28TgcsGlCD3L8 Hcc hIgG1LALAPA - peptide
DIQMTQSPSSLSASVGDRVTITCHASQNIYVWLNWYQQKPGKAPKLLIYKASNLHTGVPSRFSGSGSGTDFTLTISSLQPEDFATYYCQQGQTYPYTFGGGTKVEIKGGSGGQAVVTQEPSLTVSPGGTVTLTCGSSTGAVTTSNYANWVQEKPGQAFRGLIGGTNKRAPGTPARFSGSLLGGKAALTLSGAQPEDEAEYYCALWYSNLWVFGGGTKLTVLGSGGSAGSGSGGGGSASGSGEVQLLESGGGLVQPGGSLRLSCAASGFTFSTYAMNWVRQAPGKGLEWVSRIRSKYNNYATYYADSVKGRFTISRDDSKNTLYLQMNSLRAEDTAVYYCVRHGNFGNSYVSWFAYWGQGTLVTVSSGGSGGQVQLVQSGAEVKKPGASVKVSCKASGYTFTSYYIHWVRQAPGQGLEWIGSIYPGNVNTNYNEKFKDRATLTVDTSISTAYMELSRLRSDDTAVYFCTRSHYGLDWNFDVWGQGTTVTVSSASGGSGDKTHTCPPCPAPEAAGGPSVFLFPPKPKDTLMISRTPEVTCVVVDVSHEDPEVKFNWYVDGVEVHNAKTKPREEQYNSTYRVVSVLTVLHQDWLNGKEYKCKVSNKALAAPIEKTISKAKGQPREPQVCTLPPSRDELTKNQVSLSCAVKGFYPSDIAVEWESNGQPENNYKTTPPVLDSDGSFFLVSKLTVDKSRWQQGNVFSCSVMHEALHNHYTQKSLSLSPG

SEQ ID NO: 633 - DNA, 2169 bp, synthetic construct
  source 1..2169: mol_type = other DNA; note = hAhCD28TgcsGlCD3L8 Hcc hIgG1LALAPA - DNA
gacatccagatgacacagagccctagcagcctgtctgccagcgtgggagacagagtgaccatcacatgtcacgccagccagaacatctacgtgtggctgaactggtatcagcagaagcccggcaaggcccctaagctgctgatctacaaggccagcaatctgcacaccggcgtgcccagcagattttctggctctggcagcggcaccgacttcaccctgaccatatctagcctgcagcctgaggacttcgccacctactattgtcagcagggccagacatacccctacacctttggcggcggaacaaaggtggaaatcaagggcggatctggcggccaggccgtggttacacaagagccttctctgaccgtgtctcctggcggcacagtgacactgacatgtggcagttctacaggcgccgtgaccaccagcaattacgccaactgggtgcaagagaagccaggccaggccttcagaggactgatcggcggcacaaacaagagagcccctggaacaccagccagattcagcggatctctgctcggaggaaaggccgcactgacactgtctggtgcccagcctgaagatgaggccgagtactattgcgccctgtggtacagcaacctgtgggttttcggaggcggcaccaagctgacagtgcttggttctggcggcagcgccggaagtggtagtggtggcggaggatctgcttctggctctggagaagtgcagctgctggaatctggcggaggactggttcaacctggcggctctctgagactgtcttgtgccgccagcggcttcacctttagcacctacgccatgaactgggtccgacaggcccctggcaaaggccttgaatgggtgtcccggatcagaagcaagtacaacaactacgccacctactacgccgacagcgtgaagggcagattcaccatcagccgggacgacagcaagaacaccctgtacctgcagatgaacagcctgagagccgaggacaccgccgtgtactattgtgtgcggcacggcaacttcggcaacagctatgtgtcttggtttgcctactggggccagggcacactggtcacagttagctctggcggaagcggaggacaggttcagctggttcagtctggcgccgaagtgaagaaacctggcgcctctgtgaaggtgtcctgcaaggccagcggctacacctttaccagctactacatccactgggtccgacaggcccctggacaaggactggaatggatcggcagcatctaccccggcaacgtgaacaccaactacaacgagaagttcaaggaccgggccacactgaccgtggacacctctatcagcaccgcctacatggaactgagccggctgagatccgatgataccgccgtgtacttctgcaccagaagccactacggcctggactggaacttcgatgtgtggggccagggcaccaccgtgacagtttcttctgcttctggaggctccggagataagacccacacatgtcctccatgtcctgctccagaggctgctggtggcccttccgtgtttctgttccctccaaagcctaaggacaccctgatgatcagcaggacccctgaagtgacctgcgtggtggtggatgtgtctcacgaggacccagaagtgaagttcaattggtacgtggacggcgtggaagtgcacaacgccaagaccaagcctagagaggaacagtacaacagcacctacagagtggtgtccgtgctgaccgtgctgcaccaggattggctgaacggcaaagagtacaagtgcaaggtgtccaacaaggccctggccgctcctatcgagaaaaccatcagcaaggccaagggccagcctcgcgaacctcaagtctgtacactgcctcctagccgggacgagctgaccaagaatcaggtgtcactgagctgcgccgtgaagggcttttaccccagcgacattgccgtggaatgggagagcaatggccagccagagaacaactacaagacaacccctcctgtgctggacagcgacggctcatttttcctggtgtccaagctgacagtggacaagagcagatggcagcagggcaacgtgttcagctgcagcgtgatgcacgaggccctgcacaaccactacacccagaaaagcctgtctctgagccctggc

SEQ ID NO: 634 - protein, 721 aa, synthetic construct
  source 1..721: note = ahcMetahCD28TgCSLHLHL1knobLALAPA (MX974) peptide
DIVMTQSPDSLAVSLGERATINCKSSQSLLYTSSQKNYLAWYQQKPGQPPKLLIYWASTRESGVPDRFSGSGSGTDFTLTISSLQAEDVAVYYCQQYYAYPWTFGGGTKLEIKGGSSGQVQLVQSGAEVKKPGASVKVSCKASGYTFTSYYIHWVRQAPGQGLEWIGSIYPGNVNTNYNEKFKDRATLTVDTSISTAYMELSRLRSDDTAVYFCTRSHYGLDWNFDVWGQGTTVTVSSGGGGSGGSGSGGGGSASGSGDIQMTQSPSSLSASVGDRVTITCHASQNIYVWLNWYQQKPGKAPKLLIYKASNLHTGVPSRFSGSGSGTDFTLTISSLQPEDFATYYCQQGQTYPYTFGGGTKVEIKGGSSGQVQLVQSGAEVVKPGASVKLSCKASGYTFTSYWLHWVRQAPGQGLEWVGMIDPSNSDTRFNPNFKDRVTITADTSTSTAYMELSSLRSEDTAVYYCATYKSYVSPLDYWGQGTSVTVSSASGGSGDKTHTCPPCPAPEAAGGPSVFLFPPKPKDTLMISRTPEVTCVVVDVSHEDPEVKFNWYVDGVEVHNAKTKPREEQYNSTYRVVSVLTVLHQDWLNGKEYKCKVSNKALAAPIEKTISKAKGQPREPQVYTLPPCRDELTKNQVSLWCLVKGFYPSDIAVEWESNGQPENNYKTTPPVLDSDGSFFLYSKLTVDKSRWQQGNVFSCSVMHEALHNHYTQKSLSLSPG

SEQ ID NO: 635 - DNA, 2166 bp, synthetic construct
  source 1..2166: mol_type = other DNA; note = ahcMetahCD28TgCSLHLHL1knobLALAPA (MX974) DNA
gacatcgtgatgacacagagccctgatagcctggccgtgtctctgggagagagagccaccatcaactgcaagagcagccagagcctgctgtacacctccagccagaagaactacctggcctggtatcagcagaagcccggccagcctcctaagctgctgatctactgggccagcaccagagaaagcggcgtgcccgatagattttctggctctggcagcggcaccgacttcaccctgacaatttctagcctgcaagccgaggacgtggccgtgtactactgccagcagtactacgcttacccctggacctttggcggaggcaccaagctggaaatcaagggcggatcctctggacaggttcagctggttcagtctggcgccgaagtgaagaaacctggcgcctctgtgaaggtgtcctgcaaggccagcggctacacctttaccagctactacatccactgggtccgacaggcccctggacaaggactggaatggatcggcagcatctaccccggcaacgtgaacaccaactacaacgagaagttcaaggaccgggccacactgaccgtggacacctctatcagcaccgcctacatggaactgagccggctgagatccgatgataccgccgtgtacttctgcaccagaagccactacggcctggactggaacttcgatgtgtggggccagggcaccaccgtgacagtttcttctggaggtggtggctctggcggatctgggagtggtggcggaggctctgcttctggatctggagacatccagatgacacagagccctagcagcctgtctgccagcgtgggagacagagtgaccatcacatgtcacgccagccagaacatctacgtgtggctgaactggtatcagcagaagcccggcaaggcccctaagctgctgatctacaaggccagcaatctgcacaccggcgtgcccagcagattttctggctctggcagcggcaccgacttcaccctgaccatatctagcctgcagcctgaggacttcgccacctactattgtcagcagggccagacatacccctacacctttggcggcggaacaaaggtggaaatcaagggaggcagctccgggcaggttcagctggttcagtctggcgccgaggttgtgaaacctggcgcctctgtgaagctgagctgtaaagccagcggctacaccttcaccagctactggctgcactgggtccgacaggctccaggacaaggactggaatgggtcggaatgatcgaccccagcaacagcgacacccggttcaaccccaacttcaaggacagagtgaccatcaccgccgacaccagcacaagcaccgcctacatggaactgagcagcctgagaagcgaggacaccgccgtgtactactgcgccacctacaagagctacgtgtcccctctggattactggggccagggcacaagcgtgacagtgtcatctgcttctggcggctccggagataagacccacacatgtcctccatgtcctgctccagaagctgctggcggcccttctgtgttcctgtttcctccaaagcctaaggacaccctgatgatcagcagaacccctgaagtgacctgcgtggtggtggatgtgtctcacgaggaccccgaagtgaagttcaattggtacgtggacggcgtggaagtgcacaacgccaagaccaagcctagagaggaacagtacaacagcacctacagagtggtgtccgtgctgaccgtgctgcaccaggattggctgaacggcaaagagtacaagtgcaaggtgtccaacaaggccctggccgctcctatcgagaaaaccatcagcaaggccaagggccagcctagggaaccccaggtttacacccttcctccatgccgggatgagctgaccaagaaccaggtgtccctgtggtgtctcgtgaagggcttctaccccagcgacattgccgtggaatgggagagcaatggccagcctgagaacaactacaagacaacccctcctgtgctggacagcgacggctcattcttcctgtacagcaagctgacagtcgacaagtccagatggcagcagggcaacgtgttcagttgcagcgtgatgcacgaggccctgcacaaccactacacccagaagtccctgagcctgtctcctggatag

SEQ ID NO: 636 - protein, 113 aa, synthetic construct; identical to SEQ ID NO: 79
  source 1..113: note = cMet VL

SEQ ID NO: 637 - protein, 18 aa, synthetic construct
  source 1..18: note = cMet LCDR1
KSSQSLLYTSSQKNYLAW

SEQ ID NO: 638 - protein, 7 aa, synthetic construct
  source 1..7: note = cMet LCDR2
WASTRES

SEQ ID NO: 639 - protein, 9 aa, synthetic construct
  source 1..9: note = cMet LCDR3
QQYYAYPWT

SEQ ID NO: 640 - protein, 119 aa, synthetic construct; identical to SEQ ID NO: 78
  source 1..119: note = cMet VH

SEQ ID NO: 641 - protein, 7 aa, synthetic construct
  source 1..7: note = cMet HCDR1
GYTFTSY

SEQ ID NO: 642 - protein, 6 aa, synthetic construct
  source 1..6: note = cMet HCDR2
DPSNSD

SEQ ID NO: 643 - protein, 10 aa, synthetic construct
  source 1..10: note = cMet HCDR3
YKSYVSPLDY

SEQ ID NO: 644 - protein, 107 aa, synthetic construct; identical to SEQ ID NO: 55
  source 1..107: note = CD28 VL

SEQ ID NO: 645 - protein, 11 aa, synthetic construct
  source 1..11: note = CD28 LCDR1
HASQNIYVWLN

SEQ ID NO: 646 - protein, 7 aa, synthetic construct
  source 1..7: note = CD28 LCDR2
KASNLHT

SEQ ID NO: 647 - protein, 9 aa, synthetic construct
  source 1..9: note = CD28 LCDR3
QQGQTYPYT

SEQ ID NO: 648 - protein, 120 aa, synthetic construct; identical to SEQ ID NO: 54
  source 1..120: note = CD28 VH

SEQ ID NO: 649 - protein, 7 aa, synthetic construct
  source 1..7: note = CD28 HCDR1
GYTFTSY

SEQ ID NO: 650 - protein, 6 aa, synthetic construct
  source 1..6: note = CD28 HCDR2
YPGNVN

SEQ ID NO: 651 - protein, 11 aa, synthetic construct
  source 1..11: note = CD28 HCDR3
SHYGLDWNFDV

SEQ ID NO: 652 - protein, 711 aa, synthetic construct
  source 1..711: note = ahTrop2_20ahCD3LHLHholeLALAPA (MX974)  peptide
DIQMTQSPSSLSASVGDRVTITCQASQDINKYLAWYQKKPGKAPKLLIHYTSNLQTGVPSRFSGSGSGTDFTFTISSLQPEDIATYYCLQYDDLFTFGQGTKLEIKGGSSGQVQLVQSGAEVAKPGASVKVSCKASGYTFTRYTMHWVKQAPGQGLEWIGYINPSRGYTNYAQKFQGKATLTTDKSTSTAYMELSSLRSEDTAVYYCARYYDDHYSLDYWGQGTTLTVSSGGGGSGGSGSGGGGSASGSGDIQLTQSPSSLSASVGDRVTITCRASQSISYLNWYQQKPGKSPKRWIYDTSKLASGVPSRFSGSGSGTDYTLTISSMQPEDAATYYCQQWSSNPLTFGGGTKVEIKGGSSGQVQLVQSGAEVKKPGASVKVSCKASGSSFTGYTMNWVKQAPGQGLEWIGIINPYQGDTTYNQKFQGKVTITVDKSTSTVYMELSSLRSEDTAVYYCARGAGLYYFDYWGQGTTVTVSSASGGSGDKTHTCPPCPAPEAAGGPSVFLFPPKPKDTLMISRTPEVTCVVVDVSHEDPEVKFNWYVDGVEVHNAKTKPREEQYNSTYRVVSVLTVLHQDWLNGKEYKCKVSNKALAAPIEKTISKAKGQPREPQVCTLPPSRDELTKNQVSLSCAVKGFYPSDIAVEWESNGQPENNYKTTPPVLDSDGSFFLVSKLTVDKSRWQQGNVFSCSVMHEALHNHYTQKSLSLSPG

SEQ ID NO: 653 - DNA, 2136 bp, synthetic construct
  source 1..2136: mol_type = other DNA; note = ahTrop2_20ahCD3LHL(MX974) HholeLALAPA - DNA
gacatccagatgacacagagccctagcagcctgtctgccagcgtgggagacagagtgaccattacctgtcaggccagccaggacatcaacaagtacctggcctggtatcagaagaagcccggcaaggctcctaagctgctgatccactacaccagcaacctgcagacaggcgtgcccagcagattttctggcagcggctctggcaccgacttcaccttcaccataagcagcctgcagcctgaggatatcgccacctactactgcctgcagtacgacgacctgttcacctttggccagggcaccaagctggaaatcaaaggcggatcctctggacaggttcagctggttcagtctggcgccgaagtggctaaacctggcgcctccgtgaaggtgtcctgtaaagccagcggctacacattcacccggtacaccatgcactgggtcaagcaggctccaggacaaggcttggagtggatcggctacatcaaccctagccggggctacaccaattacgcccagaagttccagggcaaggccacactgaccaccgacaagagcacaagcaccgcctacatggaactgagcagcctgagaagcgaggacaccgccgtgtactactgtgcccggtactacgacgaccactacagcctggattattggggccagggcacaaccctgaccgtgtcatctggaggtggtggctctggcggatctgggagtggtggcggaggctctgcttctggatctggagacatccagctgacacagagcccttctagcctgtctgccagcgtgggcgacagagtgaccatcacatgtagagccagccagagcatcagctacctgaactggtatcagcagaagcccggcaagagccccaagcggtggatctacgatacaagcaagctggcctctggcgtgcccagcagattttctggctctggcagcggcaccgactacaccctgacaatcagcagcatgcagcctgaggatgccgccacctactactgccagcagtggtccagcaatcccctgacatttggcggaggcaccaaggtggaaatcaagggaggcagctccgggcaggtccagctggtgcagtctggcgccgaagttaagaaacctggcgcctccgtgaaggtgtcctgtaaagccagcggcagcagcttcaccggctacaccatgaactgggtcaagcaggctcctggacagggactcgagtggatcggcatcatcaacccctaccagggcgacaccacctacaaccagaagttccagggcaaagtcaccatcaccgtggacaagagcaccagcaccgtgtacatggaactgtccagcctgagaagcgaggacaccgccgtgtactactgtgctagaggcgccggactgtactacttcgactattggggccagggaaccaccgtgaccgttagctctgcttctggcggctccggagataagacccacacatgtcctccatgtcctgctccagaagctgctggcggcccttctgtgttcctgtttcctccaaagcctaaggacaccctgatgatcagcagaacccctgaagtgacctgcgtggtggtggatgtgtctcacgaggaccccgaagtgaagttcaattggtacgtggacggcgtggaagtgcacaacgccaagaccaagcctagagaggaacagtacaacagcacctacagagtggtgtccgtgctgaccgtgctgcaccaggattggctgaacggcaaagagtacaagtgcaaggtgtccaacaaggccctggccgctcctatcgagaaaaccatcagcaaggccaagggccagcctagggaaccccaggtttgtacccttcctccaagccgggatgagctgaccaagaaccaggtgtccctgagctgtgccgtgaagggcttctaccccagcgacattgccgtggaatgggagagcaatggccagcctgagaacaactacaagacaacccctcctgtgctggacagcgacggctcattcttcctggtgagcaagctgacagtcgacaagtccagatggcagcagggcaacgtgttcagttgcagcgtgatgcacgaggccctgcacaaccactacacccagaagtccctgagcctgtctcctggatag

SEQ ID NO: 654 - protein, 106 aa, synthetic construct; identical to SEQ ID NO: 95
  source 1..106: note = Trop2 VL

SEQ ID NO: 655 - protein, 11 aa, synthetic construct
  source 1..11: note = Trop2 LCDR1
QASQDINKYLA

SEQ ID NO: 656 - protein, 7 aa, synthetic construct
  source 1..7: note = Trop2 LCDR2
YTSNLQT

SEQ ID NO: 657 - protein, 8 aa, synthetic construct
  source 1..8: note = Trop2 LCDR3
LQYDDLFT

SEQ ID NO: 658 - protein, 118 aa, synthetic construct; identical to SEQ ID NO: 94
  source 1..118: note = Trop2 VH

SEQ ID NO: 659 - protein, 7 aa, synthetic construct
  source 1..7: note = Trop2 HCDR1
GSSFTGY

SEQ ID NO: 660 - protein, 6 aa, synthetic construct
  source 1..6: note = Trop2 HCDR2
NPYQGD

SEQ ID NO: 661 - protein, 9 aa, synthetic construct
  source 1..9: note = Trop2 HCDR3
GAGLYYFDY

SEQ ID NO: 662 - protein, 106 aa, synthetic construct; identical to SEQ ID NO: 103
  source 1..106: note = CD3 VL

SEQ ID NO: 663 - protein, 10 aa, synthetic construct
  source 1..10: note = CD3 LCDR1
RASQSISYLN

SEQ ID NO: 664 - protein, 7 aa, synthetic construct
  source 1..7: note = CD3 LCDR2
DTSKLAS

SEQ ID NO: 665 - protein, 9 aa, synthetic construct
  source 1..9: note = CD3 LCDR3
QQWSSNPLT

SEQ ID NO: 666 - protein, 119 aa, synthetic construct; identical to SEQ ID NO: 102
  source 1..119: note = CD3 VH

SEQ ID NO: 667 - protein, 7 aa, synthetic construct
  source 1..7: note = CD3 HCDR1
GYTFTRY

SEQ ID NO: 668 - protein, 6 aa, synthetic construct
  source 1..6: note = CD3 HCDR2
NPSRGY

SEQ ID NO: 669 - protein, 10 aa, synthetic construct
  source 1..10: note = CD3 HCDR3
YYDDHYSLDY

SEQ ID NO: 670 - protein, 721 aa, synthetic construct
  source 1..721: note = ahcMetahCD28TgCSHLHL1knobLALAPA (MX975) peptide
QVQLVQSGAEVVKPGASVKLSCKASGYTFTSYWLHWVRQAPGQGLEWVGMIDPSNSDTRFNPNFKDRVTITADTSTSTAYMELSSLRSEDTAVYYCATYKSYVSPLDYWGQGTSVTVSSGGSSGDIQMTQSPSSLSASVGDRVTITCHASQNIYVWLNWYQQKPGKAPKLLIYKASNLHTGVPSRFSGSGSGTDFTLTISSLQPEDFATYYCQQGQTYPYTFGGGTKVEIKGGGGSGGSGSGGGGSASGSGQVQLVQSGAEVKKPGASVKVSCKASGYTFTSYYIHWVRQAPGQGLEWIGSIYPGNVNTNYNEKFKDRATLTVDTSISTAYMELSRLRSDDTAVYFCTRSHYGLDWNFDVWGQGTTVTVSSGGSSGDIVMTQSPDSLAVSLGERATINCKSSQSLLYTSSQKNYLAWYQQKPGQPPKLLIYWASTRESGVPDRFSGSGSGTDFTLTISSLQAEDVAVYYCQQYYAYPWTFGGGTKLEIKASGGSGDKTHTCPPCPAPEAAGGPSVFLFPPKPKDTLMISRTPEVTCVVVDVSHEDPEVKFNWYVDGVEVHNAKTKPREEQYNSTYRVVSVLTVLHQDWLNGKEYKCKVSNKALAAPIEKTISKAKGQPREPQVYTLPPCRDELTKNQVSLWCLVKGFYPSDIAVEWESNGQPENNYKTTPPVLDSDGSFFLYSKLTVDKSRWQQGNVFSCSVMHEALHNHYTQKSLSLSPG

SEQ ID NO: 671 - DNA, 2166 bp, synthetic construct
  source 1..2166: mol_type = other DNA; note = ahcMetahCD28TgCSHLHL1knobLALAPA (MX975) DNA
caggttcagctggttcagtctggcgccgaggttgtgaaacctggcgcctctgtgaagctgagctgtaaagccagcggctacaccttcaccagctactggctgcactgggtccgacaggctccaggacaaggactggaatgggtcggaatgatcgaccccagcaacagcgacacccggttcaaccccaacttcaaggacagagtgaccatcaccgccgacaccagcacaagcaccgcctacatggaactgagcagcctgagaagcgaggacaccgccgtgtactactgcgccacctacaagagctacgtgtcccctctggattactggggccagggcacaagcgtgacagtgtcatctggcggatcctctggagacatccagatgacacagagccctagcagcctgtctgccagcgtgggagacagagtgaccatcacatgtcacgccagccagaacatctacgtgtggctgaactggtatcagcagaagcccggcaaggcccctaagctgctgatctacaaggccagcaatctgcacaccggcgtgcccagcagattttctggctctggcagcggcaccgacttcaccctgaccatatctagcctgcagcctgaggacttcgccacctactattgtcagcagggccagacatacccctacacctttggcggcggaacaaaggtggaaatcaagggaggtggtggctctggcggatctgggagtggtggcggaggctctgcttctggatctggacaggttcagctggttcagtctggcgccgaagtgaagaaacctggcgcctctgtgaaggtgtcctgcaaggccagcggctacacctttaccagctactacatccactgggtccgacaggcccctggacaaggactggaatggatcggcagcatctaccccggcaacgtgaacaccaactacaacgagaagttcaaggaccgggccacactgaccgtggacacctctatcagcaccgcctacatggaactgagccggctgagatccgatgataccgccgtgtacttctgcaccagaagccactacggcctggactggaacttcgatgtgtggggccagggcaccaccgtgacagtttcttctggaggcagctccggggacatcgtgatgacacagagccctgatagcctggccgtgtctctgggagagagagccaccatcaactgcaagagcagccagagcctgctgtacacctccagccagaagaactacctggcctggtatcagcagaagcccggccagcctcctaagctgctgatctactgggccagcaccagagaaagcggcgtgcccgatagattttctggctctggcagcggcaccgacttcaccctgacaatttctagcctgcaagccgaggacgtggccgtgtactactgccagcagtactacgcttacccctggacctttggcggaggcaccaagctggaaatcaaggcttctggcggctccggagataagacccacacatgtcctccatgtcctgctccagaagctgctggcggcccttctgtgttcctgtttcctccaaagcctaaggacaccctgatgatcagcagaacccctgaagtgacctgcgtggtggtggatgtgtctcacgaggaccccgaagtgaagttcaattggtacgtggacggcgtggaagtgcacaacgccaagaccaagcctagagaggaacagtacaacagcacctacagagtggtgtccgtgctgaccgtgctgcaccaggattggctgaacggcaaagagtacaagtgcaaggtgtccaacaaggccctggccgctcctatcgagaaaaccatcagcaaggccaagggccagcctagggaaccccaggtttacacccttcctccatgccgggatgagctgaccaagaaccaggtgtccctgtggtgtctcgtgaagggcttctaccccagcgacattgccgtggaatgggagagcaatggccagcctgagaacaactacaagacaacccctcctgtgctggacagcgacggctcattcttcctgtacagcaagctgacagtcgacaagtccagatggcagcagggcaacgtgttcagttgcagcgtgatgcacgaggccctgcacaaccactacacccagaagtccctgagcctgtctcctggatag

SEQ ID NO: 672 - protein, 113 aa, synthetic construct; identical to SEQ ID NO: 79
  source 1..113: note = cMet VL

SEQ ID NO: 673 - protein, 18 aa, synthetic construct
  source 1..18: note = cMet LCDR1
KSSQSLLYTSSQKNYLAW

SEQ ID NO: 674 - protein, 7 aa, synthetic construct
  source 1..7: note = cMet LCDR2
WASTRES

SEQ ID NO: 675 - protein, 9 aa, synthetic construct
  source 1..9: note = cMet LCDR3
QQYYAYPWT

SEQ ID NO: 676 - protein, 119 aa, synthetic construct; identical to SEQ ID NO: 78
  source 1..119: note = cMet VH

SEQ ID NO: 677 - protein, 7 aa, synthetic construct
  source 1..7: note = cMet HCDR1
GYTFTSY

SEQ ID NO: 678 - protein, 6 aa, synthetic construct
  source 1..6: note = cMet HCDR2
DPSNSD

SEQ ID NO: 679 - protein, 10 aa, synthetic construct
  source 1..10: note = cMet HCDR3
YKSYVSPLDY

SEQ ID NO: 680 - protein, 107 aa, synthetic construct; identical to SEQ ID NO: 55
  source 1..107: note = CD28 VL

SEQ ID NO: 681 - protein, 11 aa, synthetic construct
  source 1..11: note = CD28 LCDR1
HASQNIYVWLN

SEQ ID NO: 682 - protein, 7 aa, synthetic construct
  source 1..7: note = CD28 LCDR2
KASNLHT

SEQ ID NO: 683 - protein, 9 aa, synthetic construct
  source 1..9: note = CD28 LCDR3
QQGQTYPYT

SEQ ID NO: 684 - protein, 120 aa, synthetic construct; identical to SEQ ID NO: 54
  source 1..120: note = CD28 VH

SEQ ID NO: 685 - protein, 7 aa, synthetic construct
  source 1..7: note = CD28 HCDR1
GYTFTSY

SEQ ID NO: 686 - protein, 6 aa, synthetic construct
  source 1..6: note = CD28 HCDR2
YPGNVN

SEQ ID NO: 687 - protein, 11 aa, synthetic construct
  source 1..11: note = CD28 HCDR3
SHYGLDWNFDV

SEQ ID NO: 688 - protein, 711 aa, synthetic construct
  source 1..711: note = ahTrop2_20ahCD3HLHLholeLALAPA
QVQLVQSGAEVKKPGASVKVSCKASGSSFTGYTMNWVKQAPGQGLEWIGIINPYQGDTTYNQKFQGKVTITVDKSTSTVYMELSSLRSEDTAVYYCARGAGLYYFDYWGQGTTVTVSSGGSSGDIQLTQSPSSLSASVGDRVTITCRASQSISYLNWYQQKPGKSPKRWIYDTSKLASGVPSRFSGSGSGTDYTLTISSMQPEDAATYYCQQWSSNPLTFGGGTKVEIKGGGGSGGSGSGGGGSASGSGQVQLVQSGAEVAKPGASVKVSCKASGYTFTRYTMHWVKQAPGQGLEWIGYINPSRGYTNYAQKFQGKATLTTDKSTSTAYMELSSLRSEDTAVYYCARYYDDHYSLDYWGQGTTLTVSSGGSSGDIQMTQSPSSLSASVGDRVTITCQASQDINKYLAWYQKKPGKAPKLLIHYTSNLQTGVPSRFSGSGSGTDFTFTISSLQPEDIATYYCLQYDDLFTFGQGTKLEIKASGGSGDKTHTCPPCPAPEAAGGPSVFLFPPKPKDTLMISRTPEVTCVVVDVSHEDPEVKFNWYVDGVEVHNAKTKPREEQYNSTYRVVSVLTVLHQDWLNGKEYKCKVSNKALAAPIEKTISKAKGQPREPQVCTLPPSRDELTKNQVSLSCAVKGFYPSDIAVEWESNGQPENNYKTTPPVLDSDGSFFLVSKLTVDKSRWQQGNVFSCSVMHEALHNHYTQKSLSLSPG

SEQ ID NO: 689 - DNA, 2136 bp, synthetic construct
  source 1..2136: mol_type = other DNA; note = ahTrop2_20ahCD3HLHLholeLALAPA
caggtgcagctggtgcagtctggcgccgaagttaagaaacctggcgcctccgtgaaggtgtcctgtaaagccagcggcagcagcttcaccggctacaccatgaactgggtcaagcaggctcctggacagggactcgagtggatcggcatcatcaacccctaccagggcgacaccacctacaaccagaagttccagggcaaagtcaccatcaccgtggacaagagcaccagcaccgtgtacatggaactgtccagcctgagaagcgaggacaccgccgtgtactactgtgctagaggcgccggactgtactacttcgactattggggccagggaaccaccgtgaccgttagctctggcggatcctctggagacatccagctgacacagagcccttctagcctgtctgccagcgtgggcgacagagtgaccatcacatgtagagccagccagagcatcagctacctgaactggtatcagcagaagcccggcaagagccccaagcggtggatctacgatacaagcaagctggcctctggcgtgcccagcagattttctggctctggcagcggcaccgactacaccctgacaatcagcagcatgcagcctgaggatgccgccacctactactgccagcagtggtccagcaatcccctgacatttggcggaggcaccaaggtggaaatcaagggaggtggtggctctggcggatctgggagtggtggcggaggctctgcttctggatctggacaggttcagctggttcagtctggcgccgaagtggctaaacctggcgcctccgtgaaggtgtcctgtaaagccagcggctacacattcacccggtacaccatgcactgggtcaagcaggctccaggacaaggcttggagtggatcggctacatcaaccctagccggggctacaccaattacgcccagaagttccagggcaaggccacactgaccaccgacaagagcacaagcaccgcctacatggaactgagcagcctgagaagcgaggacaccgccgtgtactactgtgcccggtactacgacgaccactacagcctggattattggggccagggcacaaccctgaccgtgtcatctggaggcagctccggggacatccagatgacacagagccctagcagcctgtctgccagcgtgggagacagagtgaccattacctgtcaggccagccaggacatcaacaagtacctggcctggtatcagaagaagcccggcaaggctcctaagctgctgatccactacaccagcaacctgcagacaggcgtgcccagcagattttctggcagcggctctggcaccgacttcaccttcaccataagcagcctgcagcctgaggatatcgccacctactactgcctgcagtacgacgacctgttcacctttggccagggcaccaagctggaaatcaaagcttctggcggctccggagataagacccacacatgtcctccatgtcctgctccagaagctgctggcggcccttctgtgttcctgtttcctccaaagcctaaggacaccctgatgatcagcagaacccctgaagtgacctgcgtggtggtggatgtgtctcacgaggaccccgaagtgaagttcaattggtacgtggacggcgtggaagtgcacaacgccaagaccaagcctagagaggaacagtacaacagcacctacagagtggtgtccgtgctgaccgtgctgcaccaggattggctgaacggcaaagagtacaagtgcaaggtgtccaacaaggccctggccgctcctatcgagaaaaccatcagcaaggccaagggccagcctagggaaccccaggtttgtacccttcctccaagccgggatgagctgaccaagaaccaggtgtccctgagctgtgccgtgaagggcttctaccccagcgacattgccgtggaatgggagagcaatggccagcctgagaacaactacaagacaacccctcctgtgctggacagcgacggctcattcttcctggtgagcaagctgacagtcgacaagtccagatggcagcagggcaacgtgttcagttgcagcgtgatgcacgaggccctgcacaaccactacacccagaagtccctgagcctgtctcctggatag

SEQ ID NO: 690 - protein, 106 aa, synthetic construct; identical to SEQ ID NO: 95
  source 1..106: note = Trop2 VL

SEQ ID NO: 691 - protein, 11 aa, synthetic construct
  source 1..11: note = Trop2 LCDR1
QASQDINKYLA

SEQ ID NO: 692 - protein, 7 aa, synthetic construct
  source 1..7: note = Trop2 LCDR2
YTSNLQT

SEQ ID NO: 693 - protein, 8 aa, synthetic construct
  source 1..8: note = Trop2 LCDR3
LQYDDLFT

SEQ ID NO: 694 - protein, 118 aa, synthetic construct; identical to SEQ ID NO: 94
  source 1..118: note = Trop2 VH

SEQ ID NO: 695 - protein, 5 aa, synthetic construct
  source 1..5: note = Trop2 HCDR1
GSSFT

SEQ ID NO: 696 - protein, 6 aa, synthetic construct
  source 1..6: note = Trop2 HCDR2
NPYQGD

SEQ ID NO: 697 - protein, 9 aa, synthetic construct
  source 1..9: note = Trop2 HCDR3
GAGLYYFDY

SEQ ID NO: 698 - protein, 106 aa, synthetic construct; identical to SEQ ID NO: 103
  source 1..106: note = CD3 VL

SEQ ID NO: 699 - protein, 10 aa, synthetic construct
  source 1..10: note = CD3 LCDR1
RASQSISYLN

SEQ ID NO: 700 - protein, 7 aa, synthetic construct
  source 1..7: note = CD3 LCDR2
DTSKLAS

SEQ ID NO: 701 - protein, 9 aa, synthetic construct
  source 1..9: note = CD3 LCDR3
QQWSSNPLT

SEQ ID NO: 702 - protein, 119 aa, synthetic construct; identical to SEQ ID NO: 102
  source 1..119: note = CD3 VH

SEQ ID NO: 703 - protein, 7 aa, synthetic construct
  source 1..7: note = CD3 HCDR1
GYTFTRY

SEQ ID NO: 704 - protein, 6 aa, synthetic construct
  source 1..6: note = CD3 HCDR2
NPSRGY

SEQ ID NO: 705 - protein, 10 aa, synthetic construct
  source 1..10: note = CD3 HCDR3
YYDDHYSLDY

SEQ ID NO: 706 - protein, 721 aa, synthetic construct
  source 1..721: note = ahcMetahCD28TgCSHHLL1knobLALAPA
QVQLVQSGAEVVKPGASVKLSCKASGYTFTSYWLHWVRQAPGQGLEWVGMIDPSNSDTRFNPNFKDRVTITADTSTSTAYMELSSLRSEDTAVYYCATYKSYVSPLDYWGQGTSVTVSSGGSSGQVQLVQSGAEVKKPGASVKVSCKASGYTFTSYYIHWVRQAPGQGLEWIGSIYPGNVNTNYNEKFKDRATLTVDTSISTAYMELSRLRSDDTAVYFCTRSHYGLDWNFDVWGQGTTVTVSSGGGGSGGSGSGGGGSASGSGDIQMTQSPSSLSASVGDRVTITCHASQNIYVWLNWYQQKPGKAPKLLIYKASNLHTGVPSRFSGSGSGTDFTLTISSLQPEDFATYYCQQGQTYPYTFGGGTKVEIKGGSSGDIVMTQSPDSLAVSLGERATINCKSSQSLLYTSSQKNYLAWYQQKPGQPPKLLIYWASTRESGVPDRFSGSGSGTDFTLTISSLQAEDVAVYYCQQYYAYPWTFGGGTKLEIKASGGSGDKTHTCPPCPAPEAAGGPSVFLFPPKPKDTLMISRTPEVTCVVVDVSHEDPEVKFNWYVDGVEVHNAKTKPREEQYNSTYRVVSVLTVLHQDWLNGKEYKCKVSNKALAAPIEKTISKAKGQPREPQVYTLPPCRDELTKNQVSLWCLVKGFYPSDIAVEWESNGQPENNYKTTPPVLDSDGSFFLYSKLTVDKSRWQQGNVFSCSVMHEALHNHYTQKSLSLSPG

SEQ ID NO: 707 - DNA, 2166 bp, synthetic construct
  source 1..2166: mol_type = other DNA; note = ahcMetahCD28TgCSHHLL1knobLALAPA
caggttcagctggttcagtctggcgccgaggttgtgaaacctggcgcctctgtgaagctgagctgtaaagccagcggctacaccttcaccagctactggctgcactgggtccgacaggctccaggacaaggactggaatgggtcggaatgatcgaccccagcaacagcgacacccggttcaaccccaacttcaaggacagagtgaccatcaccgccgacaccagcacaagcaccgcctacatggaactgagcagcctgagaagcgaggacaccgccgtgtactactgcgccacctacaagagctacgtgtcccctctggattactggggccagggcacaagcgtgacagtgtcatctggcggatcctctggacaggttcagctggttcagtctggcgccgaagtgaagaaacctggcgcctctgtgaaggtgtcctgcaaggccagcggctacacctttaccagctactacatccactgggtccgacaggcccctggacaaggactggaatggatcggcagcatctaccccggcaacgtgaacaccaactacaacgagaagttcaaggaccgggccacactgaccgtggacacctctatcagcaccgcctacatggaactgagccggctgagatccgatgataccgccgtgtacttctgcaccagaagccactacggcctggactggaacttcgatgtgtggggccagggcaccaccgtgacagtttcttctggaggtggtggctctggcggatctgggagtggtggcggaggctctgcttctggatctggagacatccagatgacacagagccctagcagcctgtctgccagcgtgggagacagagtgaccatcacatgtcacgccagccagaacatctacgtgtggctgaactggtatcagcagaagcccggcaaggcccctaagctgctgatctacaaggccagcaatctgcacaccggcgtgcccagcagattttctggctctggcagcggcaccgacttcaccctgaccatatctagcctgcagcctgaggacttcgccacctactattgtcagcagggccagacatacccctacacctttggcggcggaacaaaggtggaaatcaagggaggcagctccggggacatcgtgatgacacagagccctgatagcctggccgtgtctctgggagagagagccaccatcaactgcaagagcagccagagcctgctgtacacctccagccagaagaactacctggcctggtatcagcagaagcccggccagcctcctaagctgctgatctactgggccagcaccagagaaagcggcgtgcccgatagattttctggctctggcagcggcaccgacttcaccctgacaatttctagcctgcaagccgaggacgtggccgtgtactactgccagcagtactacgcttacccctggacctttggcggaggcaccaagctggaaatcaaggcttctggcggctccggagataagacccacacatgtcctccatgtcctgctccagaagctgctggcggcccttctgtgttcctgtttcctccaaagcctaaggacaccctgatgatcagcagaacccctgaagtgacctgcgtggtggtggatgtgtctcacgaggaccccgaagtgaagttcaattggtacgtggacggcgtggaagtgcacaacgccaagaccaagcctagagaggaacagtacaacagcacctacagagtggtgtccgtgctgaccgtgctgcaccaggattggctgaacggcaaagagtacaagtgcaaggtgtccaacaaggccctggccgctcctatcgagaaaaccatcagcaaggccaagggccagcctagggaaccccaggtttacacccttcctccatgccgggatgagctgaccaagaaccaggtgtccctgtggtgtctcgtgaagggcttctaccccagcgacattgccgtggaatgggagagcaatggccagcctgagaacaactacaagacaacccctcctgtgctggacagcgacggctcattcttcctgtacagcaagctgacagtcgacaagtccagatggcagcagggcaacgtgttcagttgcagcgtgatgcacgaggccctgcacaaccactacacccagaagtccctgagcctgtctcctggatag

SEQ ID NO: 708 - protein, 113 aa, synthetic construct; identical to SEQ ID NO: 79
  source 1..113: note = cMet VL

SEQ ID NO: 709 - protein, 18 aa, synthetic construct
  source 1..18: note = cMet LCDR1
KSSQSLLYTSSQKNYLAW

SEQ ID NO: 710 - protein, 7 aa, synthetic construct
  source 1..7: note = cMet LCDR2
WASTRES

SEQ ID NO: 711 - protein, 9 aa, synthetic construct
  source 1..9: note = cMet LCDR3
QQYYAYPWT

SEQ ID NO: 712 - protein, 119 aa, synthetic construct; identical to SEQ ID NO: 78
  source 1..119: note = cMet VH

SEQ ID NO: 713 - protein, 7 aa, synthetic construct
  source 1..7: note = cMet HCDR1
GYTFTSY

SEQ ID NO: 714 - protein, 6 aa, synthetic construct
  source 1..6: note = cMet HCDR2
DPSNSD

SEQ ID NO: 715 - protein, 10 aa, synthetic construct
  source 1..10: note = cMet HCDR3
YKSYVSPLDY

SEQ ID NO: 716 - protein, 107 aa, synthetic construct; identical to SEQ ID NO: 55
  source 1..107: note = CD28 VL

SEQ ID NO: 717 - protein, 11 aa, synthetic construct
  source 1..11: note = CD28 LCDR1
HASQNIYVWLN

SEQ ID NO: 718 - protein, 7 aa, synthetic construct
  source 1..7: note = CD28 LCDR2
KASNLHT

SEQ ID NO: 719 - protein, 9 aa, synthetic construct
  source 1..9: note = CD28 LCDR3
QQGQTYPYT

SEQ ID NO: 720 - protein, 120 aa, synthetic construct; identical to SEQ ID NO: 54
  source 1..120: note = CD28 VH

SEQ ID NO: 721 - protein, 7 aa, synthetic construct
  source 1..7: note = CD28 HCDR1
GYTFTSY

SEQ ID NO: 722 - protein, 6 aa, synthetic construct
  source 1..6: note = CD28 HCDR2
YPGNVN

SEQ ID NO: 723 - protein, 11 aa, synthetic construct
  source 1..11: note = CD28 HCDR3
SHYGLDWNFDV

SEQ ID NO: 724 - protein, 711 aa, synthetic construct
  source 1..711: note = ahTrop2_20xahCD3HHLLholeLALAPA
QVQLVQSGAEVKKPGASVKVSCKASGSSFTGYTMNWVKQAPGQGLEWIGIINPYQGDTTYNQKFQGKVTITVDKSTSTVYMELSSLRSEDTAVYYCARGAGLYYFDYWGQGTTVTVSSGGSSGQVQLVQSGAEVAKPGASVKVSCKASGYTFTRYTMHWVKQAPGQGLEWIGYINPSRGYTNYAQKFQGKATLTTDKSTSTAYMELSSLRSEDTAVYYCARYYDDHYSLDYWGQGTTLTVSSGGGGSGGSGSGGGGSASGSGDIQLTQSPSSLSASVGDRVTITCRASQSISYLNWYQQKPGKSPKRWIYDTSKLASGVPSRFSGSGSGTDYTLTISSMQPEDAATYYCQQWSSNPLTFGGGTKVEIKGGSSGDIQMTQSPSSLSASVGDRVTITCQASQDINKYLAWYQKKPGKAPKLLIHYTSNLQTGVPSRFSGSGSGTDFTFTISSLQPEDIATYYCLQYDDLFTFGQGTKLEIKASGGSGDKTHTCPPCPAPEAAGGPSVFLFPPKPKDTLMISRTPEVTCVVVDVSHEDPEVKFNWYVDGVEVHNAKTKPREEQYNSTYRVVSVLTVLHQDWLNGKEYKCKVSNKALAAPIEKTISKAKGQPREPQVCTLPPSRDELTKNQVSLSCAVKGFYPSDIAVEWESNGQPENNYKTTPPVLDSDGSFFLVSKLTVDKSRWQQGNVFSCSVMHEALHNHYTQKSLSLSPG

SEQ ID NO: 725 - DNA, 2136 bp, synthetic construct
  source 1..2136: mol_type = other DNA; note = ahTrop2_20xahCD3HHLLholeLALAPA
caggtgcagctggtgcagtctggcgccgaagttaagaaacctggcgcctccgtgaaggtgtcctgtaaagccagcggcagcagcttcaccggctacaccatgaactgggtcaagcaggctcctggacagggactcgagtggatcggcatcatcaacccctaccagggcgacaccacctacaaccagaagttccagggcaaagtcaccatcaccgtggacaagagcaccagcaccgtgtacatggaactgtccagcctgagaagcgaggacaccgccgtgtactactgtgctagaggcgccggactgtactacttcgactattggggccagggaaccaccgtgaccgttagctctggcggatcctctggacaggttcagctggttcagtctggcgccgaagtggctaaacctggcgcctccgtgaaggtgtcctgtaaagccagcggctacacattcacccggtacaccatgcactgggtcaagcaggctccaggacaaggcttggagtggatcggctacatcaaccctagccggggctacaccaattacgcccagaagttccagggcaaggccacactgaccaccgacaagagcacaagcaccgcctacatggaactgagcagcctgagaagcgaggacaccgccgtgtactactgtgcccggtactacgacgaccactacagcctggattattggggccagggcacaaccctgaccgtgtcatctggaggtggtggctctggcggatctgggagtggtggcggaggctctgcttctggatctggagacatccagctgacacagagcccttctagcctgtctgccagcgtgggcgacagagtgaccatcacatgtagagccagccagagcatcagctacctgaactggtatcagcagaagcccggcaagagccccaagcggtggatctacgatacaagcaagctggcctctggcgtgcccagcagattttctggctctggcagcggcaccgactacaccctgacaatcagcagcatgcagcctgaggatgccgccacctactactgccagcagtggtccagcaatcccctgacatttggcggaggcaccaaggtggaaatcaagggaggcagctccggggacatccagatgacacagagccctagcagcctgtctgccagcgtgggagacagagtgaccattacctgtcaggccagccaggacatcaacaagtacctggcctggtatcagaagaagcccggcaaggctcctaagctgctgatccactacaccagcaacctgcagacaggcgtgcccagcagattttctggcagcggctctggcaccgacttcaccttcaccataagcagcctgcagcctgaggatatcgccacctactactgcctgcagtacgacgacctgttcacctttggccagggcaccaagctggaaatcaaagcttctggcggctccggagataagacccacacatgtcctccatgtcctgctccagaagctgctggcggcccttctgtgttcctgtttcctccaaagcctaaggacaccctgatgatcagcagaacccctgaagtgacctgcgtggtggtggatgtgtctcacgaggaccccgaagtgaagttcaattggtacgtggacggcgtggaagtgcacaacgccaagaccaagcctagagaggaacagtacaacagcacctacagagtggtgtccgtgctgaccgtgctgcaccaggattggctgaacggcaaagagtacaagtgcaaggtgtccaacaaggccctggccgctcctatcgagaaaaccatcagcaaggccaagggccagcctagggaaccccaggtttgtacccttcctccaagccgggatgagctgaccaagaaccaggtgtccctgagctgtgccgtgaagggcttctaccccagcgacattgccgtggaatgggagagcaatggccagcctgagaacaactacaagacaacccctcctgtgctggacagcgacggctcattcttcctggtgagcaagctgacagtcgacaagtccagatggcagcagggcaacgtgttcagttgcagcgtgatgcacgaggccctgcacaaccactacacccagaagtccctgagcctgtctcctggatag

SEQ ID NO: 726 - protein, 106 aa, synthetic construct; identical to SEQ ID NO: 95
  source 1..106: note = Trop2 VL

SEQ ID NO: 727 - protein, 11 aa, synthetic construct
  source 1..11: note = Trop2 LCDR1
QASQDINKYLA

SEQ ID NO: 728 - protein, 7 aa, synthetic construct
  source 1..7: note = Trop2 LCDR2
YTSNLQT

SEQ ID NO: 729 - protein, 8 aa, synthetic construct
  source 1..8: note = Trop2 LCDR3
LQYDDLFT

SEQ ID NO: 730 - protein, 118 aa, synthetic construct; identical to SEQ ID NO: 94
  source 1..118: note = Trop2 VH

SEQ ID NO: 731 - protein, 7 aa, synthetic construct
  source 1..7: note = Trop2 HCDR1
GSSFTGY

SEQ ID NO: 732 - protein, 6 aa, synthetic construct
  source 1..6: note = Trop2 HCDR2
NPYQGD

SEQ ID NO: 733 - protein, 9 aa, synthetic construct
  source 1..9: note = Trop2 HCDR3
GAGLYYFDY

SEQ ID NO: 734 - protein, 106 aa, synthetic construct; identical to SEQ ID NO: 103
  source 1..106: note = CD3 VL

SEQ ID NO: 735 - protein, 10 aa, synthetic construct
  source 1..10: note = CD3 LCDR1
RASQSISYLN

SEQ ID NO: 736 - protein, 7 aa, synthetic construct
  source 1..7: note = CD3 LCDR2
DTSKLAS

SEQ ID NO: 737 - protein, 9 aa, synthetic construct
  source 1..9: note = CD3 LCDR3
QQWSSNPLT

SEQ ID NO: 738 - protein, 119 aa, synthetic construct; identical to SEQ ID NO: 102
  source 1..119: note = CD3 VH

SEQ ID NO: 739 - protein, 7 aa, synthetic construct
  source 1..7: note = CD3 HCDR1
GYTFTRY

SEQ ID NO: 740 - protein, 6 aa, synthetic construct
  source 1..6: note = CD3 HCDR2
NPSRGY

SEQ ID NO: 741 - protein, 10 aa, synthetic construct
  source 1..10: note = CD3 HCDR3
YYDDHYSLDY

SEQ ID NO: 742 - protein, 726 aa, synthetic construct
  source 1..726: note = ahCD19xah20ofL1LHLHFcknobLALAPA
DIQLTQSPSFLSASVGDRVTITCKASQSVDYSGDSYLNWYQQKPGKAPKLLIYDASNLVSGVPSRFSGSGSGTEFTLTISSLQPEDFATYYCQQSTENPWTFGGGTKLEIKGGSSGEVQLVESGGGLVQPGRSLRLSCAASGFTFNDYAMHWVRQAPGKGLEWVSTISWNSGSIGYADSVKGRFTISRDNAKKSLYLQMNSLRAEDTALYYCAKDIQYGNYYYGMDVWGQGTTVTVSSGGGGSGGSGSGGGGSASGSGEIVLTQSPATLSLSPGERATLSCRASQSVSSYLAWYQQKPGQAPRLLIYDASNRATGIPARFSGSGSGTDFTLTISSLEPEDFAVYYCQQRSNWPITFGQGTRLEIKGGSSGQVQLVQSGAEVKKPGSSVKVSCKASGYAFSSYWMNWVRQAPGQGLEWMGQIWPGDSDTNYAQKFQGRVTITADESTSTAYMELSSLRSEDTAVYYCARRETTTVGRYYYAMDYWGQGTTVTVSSASGGSGDKTHTCPPCPAPEAAGGPSVFLFPPKPKDTLMISRTPEVTCVVVDVSHEDPEVKFNWYVDGVEVHNAKTKPREEQYNSTYRVVSVLTVLHQDWLNGKEYKCKVSNKALAAPIEKTISKAKGQPREPQVYTLPPCRDELTKNQVSLWCLVKGFYPSDIAVEWESNGQPENNYKTTPPVLDSDGSFFLYSKLTVDKSRWQQGNVFSCSVMHEALHNHYTQKSLSLSPG

SEQ ID NO: 743 - DNA, 2181 bp, synthetic construct
  source 1..2181: mol_type = other DNA; note = ahCD19xah20ofL1LHLHFcknobLALAPA
gacatccagctgacccagtctccaagctttctgagcgccagcgtgggcgacagagtgaccatcacatgtaaagccagccagagcgtggactacagcggcgacagctacctgaactggtatcagcagaagcccggcaaggcccctaagctgctgatctacgacgcctccaatctggtgtccggcgtgcccagcagattttctggctctggaagcggcaccgagttcaccctgaccatatctagcctgcagcctgaggacttcgccacctactactgccagcagagcacagagaacccctggacatttggcggcggaacaaagctggaaatcaagggcggatcctctggagaggtgcagctggttgaatctggcggaggactggtgcagcctggcagaagtctgagactgtcttgtgccgccagcggcttcaccttcaacgactatgccatgcactgggtccgacaggcccctggcaaaggacttgaatgggtgtccaccatcagctggaacagcggctctatcggctacgccgattccgtgaagggcagattcaccatctccagagacaacgccaagaagtccctgtacctgcagatgaacagcctgagagccgaggacacagccctgtactactgcgccaaggacatccagtacggcaactactactacggcatggacgtgtggggccagggcacaacagtgacagtctcttctggaggtggtggctctggcggatctgggagtggtggcggaggctctgcttctggatctggagagatcgtgctgacacagtctcccgccacactgtcactgtctccaggcgaaagagccacactgagctgtagagccagccagagcgtgtcctcttacctggcctggtatcagcagaagcctggacaggctccccggctgctgatctacgatgccagcaatagagccacaggcatccccgccagattttctggctctggcagcggcaccgatttcaccctgaccataagcagcctggaacctgaggacttcgccgtgtactactgccagcagagaagcaactggcccatcacctttggccagggcaccagactggaaatcaagggaggcagctccgggcaggttcagctggttcagtctggcgccgaagtgaagaaacctggcagcagcgtgaaggtgtcctgcaaggcctctggctacgccttcagcagctactggatgaactgggtccgacaggcccctggacaaggcttggaatggatgggccaaatctggcctggcgacagcgacaccaattacgcccagaaattccagggcagagtgaccatcaccgccgacgagtctacaagcaccgcctacatggaactgagcagcctgagaagcgaggacaccgccgtgtactactgtgccagacgggaaaccaccaccgtgggcagatattactacgccatggactactggggccagggcaccacagtgacagtctcttctgcttctggcggctccggagataagacccacacatgtcctccatgtcctgctccagaagctgctggcggcccttctgtgttcctgtttcctccaaagcctaaggacaccctgatgatcagcagaacccctgaagtgacctgcgtggtggtggatgtgtctcacgaggaccccgaagtgaagttcaattggtacgtggacggcgtggaagtgcacaacgccaagaccaagcctagagaggaacagtacaacagcacctacagagtggtgtccgtgctgaccgtgctgcaccaggattggctgaacggcaaagagtacaagtgcaaggtgtccaacaaggccctggccgctcctatcgagaaaaccatcagcaaggccaagggccagcctagggaaccccaggtttacacccttcctccatgccgggatgagctgaccaagaaccaggtgtccctgtggtgtctcgtgaagggcttctaccccagcgacattgccgtggaatgggagagcaatggccagcctgagaacaactacaagacaacccctcctgtgctggacagcgacggctcattcttcctgtacagcaagctgacagtcgacaagtccagatggcagcagggcaacgtgttcagttgcagcgtgatgcacgaggccctgcacaaccactacacccagaagtccctgagcctgtctcctggatag

SEQ ID NO: 744 - protein, 111 aa, synthetic construct; identical to SEQ ID NO: 127
  source 1..111: note = CD19 VL

SEQ ID NO: 745 - protein, 15 aa, synthetic construct
  source 1..15: note = CD19 LCDR1
KASQSVDYSGDSYLN

SEQ ID NO: 746 - protein, 7 aa, synthetic construct
  source 1..7: note = CD19 LCDR2
DASNLVS

SEQ ID NO: 747 - protein, 9 aa, synthetic construct
  source 1..9: note = CD19 LCDR3
QQSTENPWT

SEQ ID NO: 748 - protein, 124 aa, synthetic construct; identical to SEQ ID NO: 126
  source 1..124: note = CD19 VH

SEQ ID NO: 749 - protein, 7 aa, synthetic construct
  source 1..7: note = CD19 HCDR1
GYAFSSY

SEQ ID NO: 750 - protein, 6 aa, synthetic construct
  source 1..6: note = CD19 HCDR2
WPGDSD

SEQ ID NO: 751 - protein, 15 aa, synthetic construct
  source 1..15: note = CD19 HCDR3
RETTTVGRYYYAMDY

SEQ ID NO: 752 - protein, 107 aa, synthetic construct
  source 1..107: note = CD20 VL
EIVLTQSPATLSLSPGERATLSCRASQSVSSYLAWYQQKPGQAPRLLIYDASNRATGIPARFSGSGSGTDFTLTISSLEPEDFAVYYCQQRSNWPITFGQGTRLEIK

SEQ ID NO: 753 - protein, 11 aa, synthetic construct
  source 1..11: note = CD20 LCDR1
RASQSVSSYLA

SEQ ID NO: 754 - protein, 7 aa, synthetic construct
  source 1..7: note = CD20 LCDR2
DASNRAT

SEQ ID NO: 755 - protein, 9 aa, synthetic construct
  source 1..9: note = CD20 LCDR3
QQRSNWPIT

SEQ ID NO: 756 - protein, 122 aa, synthetic construct
  source 1..122: note = CD20 VH
EVQLVESGGGLVQPGRSLRLSCAASGFTFNDYAMHWVRQAPGKGLEWVSTISWNSGSIGYADSVKGRFTISRDNAKKSLYLQMNSLRAEDTALYYCAKDIQYGNYYYGMDVWGQGTTVTVSS

SEQ ID NO: 757 - protein, 7 aa, synthetic construct
  source 1..7: note = CD20 HCDR1
GFTFNDY

SEQ ID NO: 758 - protein, 6 aa, synthetic construct
  source 1..6: note = CD20 HCDR2
SWNSGS

SEQ ID NO: 759 - protein, 13 aa, synthetic construct
  source 1..13: note = CD20 HCDR3
DIQYGNYYYGMDV

SEQ ID NO: 760 - protein, 714 aa, synthetic construct
  source 1..714: note = ahCD3xahCD28TgCSL1LHLHholeLALAPA
DIQLTQSPSSLSASVGDRVTITCRASQSISYLNWYQQKPGKSPKRWIYDTSKLASGVPSRFSGSGSGTDYTLTISSMQPEDAATYYCQQWSSNPLTFGGGTKVEIKGGSSGQVQLVQSGAEVKKPGASVKVSCKASGYTFTSYYIHWVRQAPGQGLEWIGSIYPGNVNTNYNEKFKDRATLTVDTSISTAYMELSRLRSDDTAVYFCTRSHYGLDWNFDVWGQGTTVTVSSGGGGSGGSGSGGGGSASGSGDIQMTQSPSSLSASVGDRVTITCHASQNIYVWLNWYQQKPGKAPKLLIYKASNLHTGVPSRFSGSGSGTDFTLTISSLQPEDFATYYCQQGQTYPYTFGGGTKVEIKGGSSGQVQLVQSGAEVAKPGASVKVSCKASGYTFTRYTMHWVKQAPGQGLEWIGYINPSRGYTNYAQKFQGKATLTTDKSTSTAYMELSSLRSEDTAVYYCARYYDDHYSLDYWGQGTTLTVSSASGGSGDKTHTCPPCPAPEAAGGPSVFLFPPKPKDTLMISRTPEVTCVVVDVSHEDPEVKFNWYVDGVEVHNAKTKPREEQYNSTYRVVSVLTVLHQDWLNGKEYKCKVSNKALAAPIEKTISKAKGQPREPQVCTLPPSRDELTKNQVSLSCAVKGFYPSDIAVEWESNGQPENNYKTTPPVLDSDGSFFLVSKLTVDKSRWQQGNVFSCSVMHEALHNHYTQKSLSLSPG

SEQ ID NO: 761 - DNA, 2145 bp, synthetic construct
  source 1..2145: mol_type = other DNA; note = ahCD3xahCD28TgCSL1LHLHholeLALAPA
gacatccagctgacacagagcccttctagcctgtctgccagcgtgggcgacagagtgaccatcacatgtagagccagccagagcatcagctacctgaactggtatcagcagaagcccggcaagagccccaagcggtggatctacgatacaagcaagctggcctctggcgtgcccagcagattttctggctctggcagcggcaccgactacaccctgacaatcagcagcatgcagcctgaggatgccgccacctactactgccagcagtggtccagcaatcccctgacatttggcggaggcaccaaggtggaaatcaagggcggatcctctggacaggttcagctggttcagtctggcgccgaagtgaagaaacctggcgcctctgtgaaggtgtcctgcaaggccagcggctacacctttaccagctactacatccactgggtccgacaggcccctggacaaggactggaatggatcggcagcatctaccccggcaacgtgaacaccaactacaacgagaagttcaaggaccgggccacactgaccgtggacacctctatcagcaccgcctacatggaactgagccggctgagatccgatgataccgccgtgtacttctgcaccagaagccactacggcctggactggaacttcgatgtgtggggccagggcaccaccgtgacagtttcttctggaggtggtggctctggcggatctgggagtggtggcggaggctctgcttctggatctggagacatccagatgacacagagccctagcagcctgtctgccagcgtgggagacagagtgaccatcacatgtcacgccagccagaacatctacgtgtggctgaactggtatcagcagaagcccggcaaggcccctaagctgctgatctacaaggccagcaatctgcacaccggcgtgcccagcagattttctggctctggcagcggcaccgacttcaccctgaccatatctagcctgcagcctgaggacttcgccacctactattgtcagcagggccagacatacccctacacctttggcggcggaacaaaggtggaaatcaagggaggcagctccgggcaggttcagctggttcagtctggcgccgaagtggctaaacctggcgcctccgtgaaggtgtcctgtaaagccagcggctacacattcacccggtacaccatgcactgggtcaagcaggctccaggacaaggcttggagtggatcggctacatcaaccctagccggggctacaccaattacgcccagaagttccagggcaaggccacactgaccaccgacaagagcacaagcaccgcctacatggaactgagcagcctgagaagcgaggacaccgccgtgtactactgtgcccggtactacgacgaccactacagcctggattattggggccagggcacaaccctgaccgtgtcatctgcttctggcggctccggagataagacccacacatgtcctccatgtcctgctccagaagctgctggcggcccttctgtgttcctgtttcctccaaagcctaaggacaccctgatgatcagcagaacccctgaagtgacctgcgtggtggtggatgtgtctcacgaggaccccgaagtgaagttcaattggtacgtggacggcgtggaagtgcacaacgccaagaccaagcctagagaggaacagtacaacagcacctacagagtggtgtccgtgctgaccgtgctgcaccaggattggctgaacggcaaagagtacaagtgcaaggtgtccaacaaggccctggccgctcctatcgagaaaaccatcagcaaggccaagggccagcctagggaaccccaggtttgtacccttcctccaagccgggatgagctgaccaagaaccaggtgtccctgagctgtgccgtgaagggcttctaccccagcgacattgccgtggaatgggagagcaatggccagcctgagaacaactacaagacaacccctcctgtgctggacagcgacggctcattcttcctggtgagcaagctgacagtcgacaagtccagatggcagcagggcaacgtgttcagttgcagcgtgatgcacgaggccctgcacaaccactacacccagaagtccctgagcctgtctcctggatag

SEQ ID NO: 762 - protein, 106 aa, synthetic construct; identical to SEQ ID NO: 103
  source 1..106: note = CD3 VL

SEQ ID NO: 763 - protein, 10 aa, synthetic construct
  source 1..10: note = CD3 LCDR1
RASQSISYLN

SEQ ID NO: 764 - protein, 7 aa, synthetic construct
  source 1..7: note = CD3 LCDR2
DTSKLAS

SEQ ID NO: 765 - protein, 9 aa, synthetic construct
  source 1..9: note = CD3 LCDR3
QQWSSNPLT

SEQ ID NO: 766 - protein, 119 aa, synthetic construct; identical to SEQ ID NO: 102
  source 1..119: note = CD3 VH

SEQ ID NO: 767 - protein, 7 aa, synthetic construct
  source 1..7: note = CD3 HCDR1
GYTFTRY

SEQ ID NO: 768 - protein, 6 aa, synthetic construct
  source 1..6: note = CD3 HCDR2
NPSRGY

SEQ ID NO: 769 - protein, 10 aa, synthetic construct
  source 1..10: note = CD3 HCDR3
YYDDHYSLDY

SEQ ID NO: 770 - protein, 107 aa, synthetic construct; identical to SEQ ID NO: 55
  source 1..107: note = CD28 VL

SEQ ID NO: 771 - protein, 11 aa, synthetic construct
  source 1..11: note = CD28 LCDR1
HASQNIYVWLN

SEQ ID NO: 772 - protein, 7 aa, synthetic construct
  source 1..7: note = CD28 LCDR2
KASNLHT

SEQ ID NO: 773 - protein, 9 aa, synthetic construct
  source 1..9: note = CD28 LCDR3
QQGQTYPYT

SEQ ID NO: 774 - protein, 120 aa, synthetic construct; identical to SEQ ID NO: 54
  source 1..120: note = CD28 VH

SEQ ID NO: 775 - protein, 7 aa, synthetic construct
  source 1..7: note = CD28 HCDR1
GYTFTSY

SEQ ID NO: 776 - protein, 6 aa, synthetic construct
  source 1..6: note = CD28 HCDR2
YPGNVN

SEQ ID NO: 777 - protein, 11 aa, synthetic construct
  source 1..11: note = CD28 HCDR3
SHYGLDWNFDV

SEQ ID NO: 778 - protein, 726 aa, synthetic construct
  source 1..726: note = ahCD19xah20ofaL1HLHLFcknobLALAPA
QVQLVQSGAEVKKPGSSVKVSCKASGYAFSSYWMNWVRQAPGQGLEWMGQIWPGDSDTNYAQKFQGRVTITADESTSTAYMELSSLRSEDTAVYYCARRETTTVGRYYYAMDYWGQGTTVTVSSGGSSGEIVLTQSPATLSLSPGERATLSCRASQSVSSYLAWYQQKPGQAPRLLIYDASNRATGIPARFSGSGSGTDFTLTISSLEPEDFAVYYCQQRSNWPITFGQGTRLEIKGGGGSGGSGSGGGGSASGSGEVQLVESGGGLVQPGRSLRLSCAASGFTFNDYAMHWVRQAPGKGLEWVSTISWNSGSIGYADSVKGRFTISRDNAKKSLYLQMNSLRAEDTALYYCAKDIQYGNYYYGMDVWGQGTTVTVSSGGSSGDIQLTQSPSFLSASVGDRVTITCKASQSVDYSGDSYLNWYQQKPGKAPKLLIYDASNLVSGVPSRFSGSGSGTEFTLTISSLQPEDFATYYCQQSTENPWTFGGGTKLEIKASGGSGDKTHTCPPCPAPEAAGGPSVFLFPPKPKDTLMISRTPEVTCVVVDVSHEDPEVKFNWYVDGVEVHNAKTKPREEQYNSTYRVVSVLTVLHQDWLNGKEYKCKVSNKALAAPIEKTISKAKGQPREPQVYTLPPCRDELTKNQVSLWCLVKGFYPSDIAVEWESNGQPENNYKTTPPVLDSDGSFFLYSKLTVDKSRWQQGNVFSCSVMHEALHNHYTQKSLSLSPG

SEQ ID NO: 779 - DNA, 2181 bp, synthetic construct
  source 1..2181: mol_type = other DNA; note = ahCD19xah20ofaL1HLHLFcknobLALAPA
caggttcagctggttcagtctggcgccgaagtgaagaaacctggcagcagcgtgaaggtgtcctgcaaggcctctggctacgccttcagcagctactggatgaactgggtccgacaggcccctggacaaggcttggaatggatgggccaaatctggcctggcgacagcgacaccaattacgcccagaaattccagggcagagtgaccatcaccgccgacgagtctacaagcaccgcctacatggaactgagcagcctgagaagcgaggacaccgccgtgtactactgtgccagacgggaaaccaccaccgtgggcagatattactacgccatggactactggggccagggcaccacagtgacagtctcttctggcggatcctctggagagatcgtgctgacacagtctcccgccacactgtcactgtctccaggcgaaagagccacactgagctgtagagccagccagagcgtgtcctcttacctggcctggtatcagcagaagcctggacaggctccccggctgctgatctacgatgccagcaatagagccacaggcatccccgccagattttctggctctggcagcggcaccgatttcaccctgaccataagcagcctggaacctgaggacttcgccgtgtactactgccagcagagaagcaactggcccatcacctttggccagggcaccagactggaaatcaagggaggtggtggctctggcggatctgggagtggtggcggaggctctgcttctggatctggagaggtgcagctggttgaatctggcggaggactggtgcagcctggcagaagtctgagactgtcttgtgccgccagcggcttcaccttcaacgactatgccatgcactgggtccgacaggcccctggcaaaggacttgaatgggtgtccaccatcagctggaacagcggctctatcggctacgccgattccgtgaagggcagattcaccatctccagagacaacgccaagaagtccctgtacctgcagatgaacagcctgagagccgaggacacagccctgtactactgcgccaaggacatccagtacggcaactactactacggcatggacgtgtggggccagggcacaacagtgacagtctcttctggaggcagctccggggacatccagctgacccagtctccaagctttctgagcgccagcgtgggcgacagagtgaccatcacatgtaaagccagccagagcgtggactacagcggcgacagctacctgaactggtatcagcagaagcccggcaaggcccctaagctgctgatctacgacgcctccaatctggtgtccggcgtgcccagcagattttctggctctggaagcggcaccgagttcaccctgaccatatctagcctgcagcctgaggacttcgccacctactactgccagcagagcacagagaacccctggacatttggcggcggaacaaagctggaaatcaaggcttctggcggctccggagataagacccacacatgtcctccatgtcctgctccagaagctgctggcggcccttctgtgttcctgtttcctccaaagcctaaggacaccctgatgatcagcagaacccctgaagtgacctgcgtggtggtggatgtgtctcacgaggaccccgaagtgaagttcaattggtacgtggacggcgtggaagtgcacaacgccaagaccaagcctagagaggaacagtacaacagcacctacagagtggtgtccgtgctgaccgtgctgcaccaggattggctgaacggcaaagagtacaagtgcaaggtgtccaacaaggccctggccgctcctatcgagaaaaccatcagcaaggccaagggccagcctagggaaccccaggtttacacccttcctccatgccgggatgagctgaccaagaaccaggtgtccctgtggtgtctcgtgaagggcttctaccccagcgacattgccgtggaatgggagagcaatggccagcctgagaacaactacaagacaacccctcctgtgctggacagcgacggctcattcttcctgtacagcaagctgacagtcgacaagtccagatggcagcagggcaacgtgttcagttgcagcgtgatgcacgaggccctgcacaaccactacacccagaagtccctgagcctgtctcctggatag

SEQ ID NO: 780 - protein, 111 aa, synthetic construct; identical to SEQ ID NO: 127
  source 1..111: note = CD19 VL

SEQ ID NO: 781 - protein, 15 aa, synthetic construct
  source 1..15: note = CD19 LCDR1
KASQSVDYSGDSYLN

SEQ ID NO: 782 - protein, 7 aa, synthetic construct
  source 1..7: note = CD19 LCDR2
DASNLVS

SEQ ID NO: 783 - protein, 9 aa, synthetic construct
  source 1..9: note = CD19 LCDR3
QQSTENPWT

SEQ ID NO: 784 - protein, 124 aa, synthetic construct; identical to SEQ ID NO: 126
  source 1..124: note = CD19 VH

SEQ ID NO: 785 - protein, 7 aa, synthetic construct
  source 1..7: note = CD19 HCDR1
GYAFSSY

SEQ ID NO: 786 - protein, 6 aa, synthetic construct
  source 1..6: note = CD19 HCDR2
WPGDSD

SEQ ID NO: 787 - protein, 15 aa, synthetic construct
  source 1..15: note = CD19 HCDR3
RETTTVGRYYYAMDY

SEQ ID NO: 788 - protein, 107 aa, synthetic construct; identical to SEQ ID NO: 752
  source 1..107: note = CD20 VL

SEQ ID NO: 789 - protein, 11 aa, synthetic construct
  source 1..11: note = CD20 LCDR1
RASQSVSSYLA

SEQ ID NO: 790 - protein, 7 aa, synthetic construct
  source 1..7: note = CD20 LCDR2
DASNRAT

SEQ ID NO: 791 - protein, 9 aa, synthetic construct
  source 1..9: note = CD20 LCDR3
QQRSNWPIT

SEQ ID NO: 792 - protein, 122 aa, synthetic construct; identical to SEQ ID NO: 756
  source 1..122: note = CD20 VH

SEQ ID NO: 793 - protein, 7 aa, synthetic construct
  source 1..7: note = CD20 HCDR1
GFTFNDY

SEQ ID NO: 794 - protein, 6 aa, synthetic construct
  source 1..6: note = CD20 HCDR2
SWNSGS

SEQ ID NO: 795 - protein, 13 aa, synthetic construct
  source 1..13: note = CD20 HCDR3
DIQYGNYYYGMDV

SEQ ID NO: 796 - protein, 714 aa, synthetic construct
  source 1..714: note = ahCD3xahCD28TgCSL1HLHLholeLALAPA
QVQLVQSGAEVAKPGASVKVSCKASGYTFTRYTMHWVKQAPGQGLEWIGYINPSRGYTNYAQKFQGKATLTTDKSTSTAYMELSSLRSEDTAVYYCARYYDDHYSLDYWGQGTTLTVSSGGSSGDIQMTQSPSSLSASVGDRVTITCHASQNIYVWLNWYQQKPGKAPKLLIYKASNLHTGVPSRFSGSGSGTDFTLTISSLQPEDFATYYCQQGQTYPYTFGGGTKVEIKGGGGSGGSGSGGGGSASGSGQVQLVQSGAEVKKPGASVKVSCKASGYTFTSYYIHWVRQAPGQGLEWIGSIYPGNVNTNYNEKFKDRATLTVDTSISTAYMELSRLRSDDTAVYFCTRSHYGLDWNFDVWGQGTTVTVSSGGSSGDIQLTQSPSSLSASVGDRVTITCRASQSISYLNWYQQKPGKSPKRWIYDTSKLASGVPSRFSGSGSGTDYTLTISSMQPEDAATYYCQQWSSNPLTFGGGTKVEIKASGGSGDKTHTCPPCPAPEAAGGPSVFLFPPKPKDTLMISRTPEVTCVVVDVSHEDPEVKFNWYVDGVEVHNAKTKPREEQYNSTYRVVSVLTVLHQDWLNGKEYKCKVSNKALAAPIEKTISKAKGQPREPQVCTLPPSRDELTKNQVSLSCAVKGFYPSDIAVEWESNGQPENNYKTTPPVLDSDGSFFLVSKLTVDKSRWQQGNVFSCSVMHEALHNHYTQKSLSLSPG

SEQ ID NO: 797 - DNA, 2145 bp, synthetic construct
  source 1..2145: mol_type = other DNA; note = ahCD3xahCD28TgCSL1HLHLholeLALAPA
caggttcagctggttcagtctggcgccgaagtggctaaacctggcgcctccgtgaaggtgtcctgtaaagccagcggctacacattcacccggtacaccatgcactgggtcaagcaggctccaggacaaggcttggagtggatcggctacatcaaccctagccggggctacaccaattacgcccagaagttccagggcaaggccacactgaccaccgacaagagcacaagcaccgcctacatggaactgagcagcctgagaagcgaggacaccgccgtgtactactgtgcccggtactacgacgaccactacagcctggattattggggccagggcacaaccctgaccgtgtcatctggcggatcctctggagacatccagatgacacagagccctagcagcctgtctgccagcgtgggagacagagtgaccatcacatgtcacgccagccagaacatctacgtgtggctgaactggtatcagcagaagcccggcaaggcccctaagctgctgatctacaaggccagcaatctgcacaccggcgtgcccagcagattttctggctctggcagcggcaccgacttcaccctgaccatatctagcctgcagcctgaggacttcgccacctactattgtcagcagggccagacatacccctacacctttggcggcggaacaaaggtggaaatcaagggaggtggtggctctggcggatctgggagtggtggcggaggctctgcttctggatctggacaggttcagctggttcagtctggcgccgaagtgaagaaacctggcgcctctgtgaaggtgtcctgcaaggccagcggctacacctttaccagctactacatccactgggtccgacaggcccctggacaaggactggaatggatcggcagcatctaccccggcaacgtgaacaccaactacaacgagaagttcaaggaccgggccacactgaccgtggacacctctatcagcaccgcctacatggaactgagccggctgagatccgatgataccgccgtgtacttctgcaccagaagccactacggcctggactggaacttcgatgtgtggggccagggcaccaccgtgacagtttcttctggaggcagctccggggacatccagctgacacagagcccttctagcctgtctgccagcgtgggcgacagagtgaccatcacatgtagagccagccagagcatcagctacctgaactggtatcagcagaagcccggcaagagccccaagcggtggatctacgatacaagcaagctggcctctggcgtgcccagcagattttctggctctggcagcggcaccgactacaccctgacaatcagcagcatgcagcctgaggatgccgccacctactactgccagcagtggtccagcaatcccctgacatttggcggaggcaccaaggtggaaatcaaggcttctggcggctccggagataagacccacacatgtcctccatgtcctgctccagaagctgctggcggcccttctgtgttcctgtttcctccaaagcctaaggacaccctgatgatcagcagaacccctgaagtgacctgcgtggtggtggatgtgtctcacgaggaccccgaagtgaagttcaattggtacgtggacggcgtggaagtgcacaacgccaagaccaagcctagagaggaacagtacaacagcacctacagagtggtgtccgtgctgaccgtgctgcaccaggattggctgaacggcaaagagtacaagtgcaaggtgtccaacaaggccctggccgctcctatcgagaaaaccatcagcaaggccaagggccagcctagggaaccccaggtttgtacccttcctccaagccgggatgagctgaccaagaaccaggtgtccctgagctgtgccgtgaagggcttctaccccagcgacattgccgtggaatgggagagcaatggccagcctgagaacaactacaagacaacccctcctgtgctggacagcgacggctcattcttcctggtgagcaagctgacagtcgacaagtccagatggcagcagggcaacgtgttcagttgcagcgtgatgcacgaggccctgcacaaccactacacccagaagtccctgagcctgtctcctggatag

SEQ ID NO: 798 - protein, 106 aa, synthetic construct; identical to SEQ ID NO: 103
  source 1..106: note = CD3 VL

SEQ ID NO: 799 - protein, 10 aa, synthetic construct
  source 1..10: note = CD3 LCDR1
RASQSISYLN

SEQ ID NO: 800 - protein, 7 aa, synthetic construct
  source 1..7: note = CD3 LCDR2
DTSKLAS

SEQ ID NO: 801 - protein, 9 aa, synthetic construct
  source 1..9: note = CD3 LCDR3
QQWSSNPLT

SEQ ID NO: 802 - protein, 119 aa, synthetic construct; identical to SEQ ID NO: 102
  source 1..119: note = CD3 VH

SEQ ID NO: 803 - protein, 7 aa, synthetic construct
  source 1..7: note = CD3 HCDR1
GYTFTRY

SEQ ID NO: 804 - protein, 6 aa, synthetic construct
  source 1..6: note = CD3 HCDR2
NPSRGY

SEQ ID NO: 805 - protein, 10 aa, synthetic construct
  source 1..10: note = CD3 HCDR3
YYDDHYSLDY

SEQ ID NO: 806 - protein, 107 aa, synthetic construct; identical to SEQ ID NO: 55
  source 1..107: note = CD28 VL

SEQ ID NO: 807 - protein, 11 aa, synthetic construct
  source 1..11: note = CD28 LCDR1
HASQNIYVWLN

SEQ ID NO: 808 - protein, 7 aa, synthetic construct
  source 1..7: note = CD28 LCDR2
KASNLHT

SEQ ID NO: 809 - protein, 9 aa, synthetic construct
  source 1..9: note = QQGQTYPYT
QQGQTYPYT

SEQ ID NO: 810 - protein, 120 aa, synthetic construct; identical to SEQ ID NO: 54
  source 1..120: note = CD28 VH

SEQ ID NO: 811 - protein, 7 aa, synthetic construct
  source 1..7: note = CD28 HCDR1
GYTFTSY

SEQ ID NO: 812 - protein, 6 aa, synthetic construct
  source 1..6: note = CD28 HCDR2
YPGNVN

SEQ ID NO: 813 - protein, 11 aa, synthetic construct
  source 1..11: note = CD28 HCDR3
SHYGLDWNFDV

SEQ ID NO: 814 - protein, 726 aa, synthetic construct
  source 1..726: note = ahCD19xah20ofL1HHLLFcknobLALAPA
QVQLVQSGAEVKKPGSSVKVSCKASGYAFSSYWMNWVRQAPGQGLEWMGQIWPGDSDTNYAQKFQGRVTITADESTSTAYMELSSLRSEDTAVYYCARRETTTVGRYYYAMDYWGQGTTVTVSSGGSSGEVQLVESGGGLVQPGRSLRLSCAASGFTFNDYAMHWVRQAPGKGLEWVSTISWNSGSIGYADSVKGRFTISRDNAKKSLYLQMNSLRAEDTALYYCAKDIQYGNYYYGMDVWGQGTTVTVSSGGGGSGGSGSGGGGSASGSGEIVLTQSPATLSLSPGERATLSCRASQSVSSYLAWYQQKPGQAPRLLIYDASNRATGIPARFSGSGSGTDFTLTISSLEPEDFAVYYCQQRSNWPITFGQGTRLEIKGGSSGDIQLTQSPSFLSASVGDRVTITCKASQSVDYSGDSYLNWYQQKPGKAPKLLIYDASNLVSGVPSRFSGSGSGTEFTLTISSLQPEDFATYYCQQSTENPWTFGGGTKLEIKASGGSGDKTHTCPPCPAPEAAGGPSVFLFPPKPKDTLMISRTPEVTCVVVDVSHEDPEVKFNWYVDGVEVHNAKTKPREEQYNSTYRVVSVLTVLHQDWLNGKEYKCKVSNKALAAPIEKTISKAKGQPREPQVYTLPPCRDELTKNQVSLWCLVKGFYPSDIAVEWESNGQPENNYKTTPPVLDSDGSFFLYSKLTVDKSRWQQGNVFSCSVMHEALHNHYTQKSLSLSPG

SEQ ID NO: 815 - DNA, 2181 bp, synthetic construct
  source 1..2181: mol_type = other DNA; note = ahCD19xah20ofL1HHLLFcknobLALAPA
caggttcagctggttcagtctggcgccgaagtgaagaaacctggcagcagcgtgaaggtgtcctgcaaggcctctggctacgccttcagcagctactggatgaactgggtccgacaggcccctggacaaggcttggaatggatgggccaaatctggcctggcgacagcgacaccaattacgcccagaaattccagggcagagtgaccatcaccgccgacgagtctacaagcaccgcctacatggaactgagcagcctgagaagcgaggacaccgccgtgtactactgtgccagacgggaaaccaccaccgtgggcagatattactacgccatggactactggggccagggcaccacagtgacagtctcttctggcggatcctctggagaggtgcagctggttgaatctggcggaggactggtgcagcctggcagaagtctgagactgtcttgtgccgccagcggcttcaccttcaacgactatgccatgcactgggtccgacaggcccctggcaaaggacttgaatgggtgtccaccatcagctggaacagcggctctatcggctacgccgattccgtgaagggcagattcaccatctccagagacaacgccaagaagtccctgtacctgcagatgaacagcctgagagccgaggacacagccctgtactactgcgccaaggacatccagtacggcaactactactacggcatggacgtgtggggccagggcacaacagtgacagtctcttctggaggtggtggctctggcggatctgggagtggtggcggaggctctgcttctggatctggagagatcgtgctgacacagtctcccgccacactgtcactgtctccaggcgaaagagccacactgagctgtagagccagccagagcgtgtcctcttacctggcctggtatcagcagaagcctggacaggctccccggctgctgatctacgatgccagcaatagagccacaggcatccccgccagattttctggctctggcagcggcaccgatttcaccctgaccataagcagcctggaacctgaggacttcgccgtgtactactgccagcagagaagcaactggcccatcacctttggccagggcaccagactggaaatcaagggaggcagctccggggacatccagctgacccagtctccaagctttctgagcgccagcgtgggcgacagagtgaccatcacatgtaaagccagccagagcgtggactacagcggcgacagctacctgaactggtatcagcagaagcccggcaaggcccctaagctgctgatctacgacgcctccaatctggtgtccggcgtgcccagcagattttctggctctggaagcggcaccgagttcaccctgaccatatctagcctgcagcctgaggacttcgccacctactactgccagcagagcacagagaacccctggacatttggcggcggaacaaagctggaaatcaaggcttctggcggctccggagataagacccacacatgtcctccatgtcctgctccagaagctgctggcggcccttctgtgttcctgtttcctccaaagcctaaggacaccctgatgatcagcagaacccctgaagtgacctgcgtggtggtggatgtgtctcacgaggaccccgaagtgaagttcaattggtacgtggacggcgtggaagtgcacaacgccaagaccaagcctagagaggaacagtacaacagcacctacagagtggtgtccgtgctgaccgtgctgcaccaggattggctgaacggcaaagagtacaagtgcaaggtgtccaacaaggccctggccgctcctatcgagaaaaccatcagcaaggccaagggccagcctagggaaccccaggtttacacccttcctccatgccgggatgagctgaccaagaaccaggtgtccctgtggtgtctcgtgaagggcttctaccccagcgacattgccgtggaatgggagagcaatggccagcctgagaacaactacaagacaacccctcctgtgctggacagcgacggctcattcttcctgtacagcaagctgacagtcgacaagtccagatggcagcagggcaacgtgttcagttgcagcgtgatgcacgaggccctgcacaaccactacacccagaagtccctgagcctgtctcctggatag

SEQ ID NO: 816 - protein, 111 aa, synthetic construct; identical to SEQ ID NO: 127
  source 1..111: note = CD19 VL

SEQ ID NO: 817 - protein, 15 aa, synthetic construct
  source 1..15: note = CD19 LCDR1
KASQSVDYSGDSYLN

SEQ ID NO: 818 - protein, 7 aa, synthetic construct
  source 1..7: note = CD19 LCDR2
DASNLVS

SEQ ID NO: 819 - protein, 9 aa, synthetic construct
  source 1..9: note = CD19 LCDR3
QQSTENPWT

SEQ ID NO: 820 - protein, 124 aa, synthetic construct; identical to SEQ ID NO: 126
  source 1..124: note = CD19 VH

SEQ ID NO: 821 - protein, 7 aa, synthetic construct
  source 1..7: note = CD19 HCDR1
GYAFSSY

SEQ ID NO: 822 - protein, 6 aa, synthetic construct
  source 1..6: note = CD19 HCDR2
WPGDSD

SEQ ID NO: 823 - protein, 15 aa, synthetic construct
  source 1..15: note = CD19 HCDR3
RETTTVGRYYYAMDY

SEQ ID NO: 824 - protein, 107 aa, synthetic construct; identical to SEQ ID NO: 752
  source 1..107: note = CD20 VL

SEQ ID NO: 825 - protein, 11 aa, synthetic construct
  source 1..11: note = CD20 LCDR1
RASQSVSSYLA

SEQ ID NO: 826 - protein, 7 aa, synthetic construct
  source 1..7: note = CD20 LCDR2
DASNRAT

SEQ ID NO: 827 - protein, 9 aa, synthetic construct
  source 1..9: note = CD20 LCDR3
QQRSNWPIT

SEQ ID NO: 828 - protein, 122 aa, synthetic construct; identical to SEQ ID NO: 756
  source 1..122: note = CD20 VH

SEQ ID NO: 829 - protein, 7 aa, synthetic construct
  source 1..7: note = CD20 HCDR1
GFTFNDY

SEQ ID NO: 830 - protein, 6 aa, synthetic construct
  source 1..6: note = CD20 HCDR2
SWNSGS

SEQ ID NO: 831 - protein, 13 aa, synthetic construct
  source 1..13: note = CD20 HCDR3
DIQYGNYYYGMDV

SEQ ID NO: 832 - protein, 714 aa, synthetic construct
  source 1..714: note = ahCD3ahCD28TgCSL1HHLLholeLALAPA
QVQLVQSGAEVAKPGASVKVSCKASGYTFTRYTMHWVKQAPGQGLEWIGYINPSRGYTNYAQKFQGKATLTTDKSTSTAYMELSSLRSEDTAVYYCARYYDDHYSLDYWGQGTTLTVSSGGSSGQVQLVQSGAEVKKPGASVKVSCKASGYTFTSYYIHWVRQAPGQGLEWIGSIYPGNVNTNYNEKFKDRATLTVDTSISTAYMELSRLRSDDTAVYFCTRSHYGLDWNFDVWGQGTTVTVSSGGGGSGGSGSGGGGSASGSGDIQMTQSPSSLSASVGDRVTITCHASQNIYVWLNWYQQKPGKAPKLLIYKASNLHTGVPSRFSGSGSGTDFTLTISSLQPEDFATYYCQQGQTYPYTFGGGTKVEIKGGSSGDIQLTQSPSSLSASVGDRVTITCRASQSISYLNWYQQKPGKSPKRWIYDTSKLASGVPSRFSGSGSGTDYTLTISSMQPEDAATYYCQQWSSNPLTFGGGTKVEIKASGGSGDKTHTCPPCPAPEAAGGPSVFLFPPKPKDTLMISRTPEVTCVVVDVSHEDPEVKFNWYVDGVEVHNAKTKPREEQYNSTYRVVSVLTVLHQDWLNGKEYKCKVSNKALAAPIEKTISKAKGQPREPQVCTLPPSRDELTKNQVSLSCAVKGFYPSDIAVEWESNGQPENNYKTTPPVLDSDGSFFLVSKLTVDKSRWQQGNVFSCSVMHEALHNHYTQKSLSLSPG

SEQ ID NO: 833 - DNA, 2145 bp, synthetic construct
  source 1..2145: mol_type = other DNA; note = ahCD3ahCD28TgCSL1HHLLholeLALAPA
caggttcagctggttcagtctggcgccgaagtggctaaacctggcgcctccgtgaaggtgtcctgtaaagccagcggctacacattcacccggtacaccatgcactgggtcaagcaggctccaggacaaggcttggagtggatcggctacatcaaccctagccggggctacaccaattacgcccagaagttccagggcaaggccacactgaccaccgacaagagcacaagcaccgcctacatggaactgagcagcctgagaagcgaggacaccgccgtgtactactgtgcccggtactacgacgaccactacagcctggattattggggccagggcacaaccctgaccgtgtcatctggcggatcctctggacaggttcagctggttcagtctggcgccgaagtgaagaaacctggcgcctctgtgaaggtgtcctgcaaggccagcggctacacctttaccagctactacatccactgggtccgacaggcccctggacaaggactggaatggatcggcagcatctaccccggcaacgtgaacaccaactacaacgagaagttcaaggaccgggccacactgaccgtggacacctctatcagcaccgcctacatggaactgagccggctgagatccgatgataccgccgtgtacttctgcaccagaagccactacggcctggactggaacttcgatgtgtggggccagggcaccaccgtgacagtttcttctggaggtggtggctctggcggatctgggagtggtggcggaggctctgcttctggatctggagacatccagatgacacagagccctagcagcctgtctgccagcgtgggagacagagtgaccatcacatgtcacgccagccagaacatctacgtgtggctgaactggtatcagcagaagcccggcaaggcccctaagctgctgatctacaaggccagcaatctgcacaccggcgtgcccagcagattttctggctctggcagcggcaccgacttcaccctgaccatatctagcctgcagcctgaggacttcgccacctactattgtcagcagggccagacatacccctacacctttggcggcggaacaaaggtggaaatcaagggaggcagctccggggacatccagctgacacagagcccttctagcctgtctgccagcgtgggcgacagagtgaccatcacatgtagagccagccagagcatcagctacctgaactggtatcagcagaagcccggcaagagccccaagcggtggatctacgatacaagcaagctggcctctggcgtgcccagcagattttctggctctggcagcggcaccgactacaccctgacaatcagcagcatgcagcctgaggatgccgccacctactactgccagcagtggtccagcaatcccctgacatttggcggaggcaccaaggtggaaatcaaggcttctggcggctccggagataagacccacacatgtcctccatgtcctgctccagaagctgctggcggcccttctgtgttcctgtttcctccaaagcctaaggacaccctgatgatcagcagaacccctgaagtgacctgcgtggtggtggatgtgtctcacgaggaccccgaagtgaagttcaattggtacgtggacggcgtggaagtgcacaacgccaagaccaagcctagagaggaacagtacaacagcacctacagagtggtgtccgtgctgaccgtgctgcaccaggattggctgaacggcaaagagtacaagtgcaaggtgtccaacaaggccctggccgctcctatcgagaaaaccatcagcaaggccaagggccagcctagggaaccccaggtttgtacccttcctccaagccgggatgagctgaccaagaaccaggtgtccctgagctgtgccgtgaagggcttctaccccagcgacattgccgtggaatgggagagcaatggccagcctgagaacaactacaagacaacccctcctgtgctggacagcgacggctcattcttcctggtgagcaagctgacagtcgacaagtccagatggcagcagggcaacgtgttcagttgcagcgtgatgcacgaggccctgcacaaccactacacccagaagtccctgagcctgtctcctggatag

SEQ ID NO: 834 - protein, 106 aa, synthetic construct; identical to SEQ ID NO: 103
  source 1..106: note = CD3 VL

SEQ ID NO: 835 - protein, 10 aa, synthetic construct
  source 1..10: note = CD3 LCDR1
RASQSISYLN

SEQ ID NO: 836 - protein, 7 aa, synthetic construct
  source 1..7: note = CD3 LCDR2
DTSKLAS

SEQ ID NO: 837 - protein, 9 aa, synthetic construct
  source 1..9: note = CD3 LCDR3
QQWSSNPLT

SEQ ID NO: 838 - protein, 119 aa, synthetic construct; identical to SEQ ID NO: 102
  source 1..119: note = CD3 VH

SEQ ID NO: 839 - protein, 7 aa, synthetic construct
  source 1..7: note = CD3 HCDR1
GYTFTRY

SEQ ID NO: 840 - protein, 6 aa, synthetic construct
  source 1..6: note = CD3 HCDR2
NPSRGY

SEQ ID NO: 841 - protein, 10 aa, synthetic construct
  source 1..10: note = CD3 HCDR3
YYDDHYSLDY

SEQ ID NO: 842 - protein, 107 aa, synthetic construct; identical to SEQ ID NO: 55
  source 1..107: note = CD28 VL

SEQ ID NO: 843 - protein, 11 aa, synthetic construct
  source 1..11: note = CD28 LCDR1
HASQNIYVWLN

SEQ ID NO: 844 - protein, 7 aa, synthetic construct
  source 1..7: note = CD28 LCDR2
KASNLHT

SEQ ID NO: 845 - protein, 9 aa, synthetic construct
  source 1..9: note = CD28 LCDR3
QQGQTYPYT

SEQ ID NO: 846 - protein, 120 aa, synthetic construct; identical to SEQ ID NO: 54
  source 1..120: note = CD28 VH

SEQ ID NO: 847 - protein, 7 aa, synthetic construct
  source 1..7: note = CD28 HCDR1
GYTFTSY

SEQ ID NO: 848 - protein, 6 aa, synthetic construct
  source 1..6: note = CD28 HCDR2
YPGNVN

SEQ ID NO: 849 - protein, 11 aa, synthetic construct
  source 1..11: note = CD28 HCDR3
SHYGLDWNFDV

SEQ ID NO: 850 - protein, 125 aa, synthetic construct
  source 1..125: note = ahCD3_Glo VH
EVQLLESGGGLVQPGGSLRLSCAASGFTFSTYAMNWVRQAPGKGLEWVSRIRSKYNNYATYYADSVKGRFTISRDDSKNTLYLQMNSLRAEDTAVYYCVRHGNFGNSYVSWFAYWGQGTLVTVSS

SEQ ID NO: 851 - protein, 5 aa, synthetic construct
  source 1..5: note = ahCD3_Glo HCDR1
TYAMN

SEQ ID NO: 852 - protein, 19 aa, synthetic construct
  source 1..19: note = ahCD3_Glo HCDR2
RIRSKYNNYATYYADSVKG

SEQ ID NO: 853 - protein, 14 aa, synthetic construct
  source 1..14: note = ahCD3_Glo HCDR3
HGNFGNSYVSWFAY

SEQ ID NO: 854 - protein, 109 aa, synthetic construct
  source 1..109: note = ahCD3_Glo VL
QAVVTQEPSLTVSPGGTVTLTCGSSTGAVTTSNYANWVQEKPGQAFRGLIGGTNKRAPGTPARFSGSLLGGKAALTLSGAQPEDEAEYYCALWYSNLWVFGGGTKLTVL

SEQ ID NO: 855 - protein, 11 aa, synthetic construct
  source 1..11: note = ahCD3_Glo LCDR1
SSTGAVTTSNY

SEQ ID NO: 856 - protein, 7 aa, synthetic construct
  source 1..7: note = ahCD3_Glo LCDR2
GTNKRAP

SEQ ID NO: 857 - protein, 9 aa, synthetic construct
  source 1..9: note = ahCD3_Glo LCDR3
ALWYSNLWV

SEQ ID NO: 858 - protein, 121 aa, synthetic construct; identical to SEQ ID NO: 38
  source 1..121: note = ahCD3_SAR VH

SEQ ID NO: 859 - protein, 5 aa, synthetic construct
  source 1..5: note = ahCD3_SAR HCDR1
KAWMH

SEQ ID NO: 860 - protein, 19 aa, synthetic construct
  source 1..19: note = ahCD3_SAR HCDR2
QIKDKSNSYATYYADSVKG

SEQ ID NO: 861 - protein, 10 aa, synthetic construct
  source 1..10: note = ahCD3_SAR HCDR3
VYYALSPFDY

SEQ ID NO: 862 - protein, 112 aa, synthetic construct; identical to SEQ ID NO: 39
  source 1..112: note = ahCD3_SAR VL

SEQ ID NO: 863 - protein, 16 aa, synthetic construct
  source 1..16: note = ahCD3_SAR LCDR1
KSSQSLVHNNANTYLS

SEQ ID NO: 864 - protein, 7 aa, synthetic construct
  source 1..7: note = ahCD3_SAR LCDR2
KVSNRFS

SEQ ID NO: 865 - protein, 9 aa, synthetic construct
  source 1..9: note = ahCD3_SAR LCDR3
GQGTQYPFT

SEQ ID NO: 866 - protein, 122 aa, synthetic construct
  source 1..122: note = ahCD20_PS VH
EVQLQQSGAELVKPGASVKMSCKASGYTFTSYNMHWVKQTPGQGLEWIGAIYPGNGDTSYNQKFKGKATLTADKSSSTAYMQLSSLTSEDSADYYCARSNYYGSSYWFFDVWGAGTTVTVSS

SEQ ID NO: 867 - protein, 5 aa, synthetic construct
  source 1..5: note = ahCD20_PS HCDR1
SYNMH

SEQ ID NO: 868 - protein, 17 aa, synthetic construct
  source 1..17: note = ahCD20_PS HCDR2
AIYPGNGDTSYNQKFKG

SEQ ID NO: 869 - protein, 13 aa, synthetic construct
  source 1..13: note = ahCD20_PS HCDR3
SNYYGSSYWFFDV

SEQ ID NO: 870 - protein, 106 aa, synthetic construct
  source 1..106: note = ahCD20_PS VL
DIVLTQSPAILSASPGEKVTMTCRASSSVNYMDWYQKKPGSSPKPWIYATSNLASGVPARFSGSGSGTSYSLTISRVEAEDAATYYCQQWSFNPPTFGGGTKLEIK

SEQ ID NO: 871 - protein, 10 aa, synthetic construct
  source 1..10: note = ahCD20_PS LCDR1
RASSSVNYMD

SEQ ID NO: 872 - protein, 7 aa, synthetic construct
  source 1..7: note = ahCD20_PS LCDR2
ATSNLAS

SEQ ID NO: 873 - protein, 9 aa, synthetic construct
  source 1..9: note = ahCD20_PS LCDR3
QQWSFNPPT

SEQ ID NO: 874 - protein, 122 aa, synthetic construct; identical to SEQ ID NO: 756
  source 1..122: note = ahCD20_of VH

SEQ ID NO: 875 - protein, 5 aa, synthetic construct
  source 1..5: note = ahCD20_of HCDR1
DYAMH

SEQ ID NO: 876 - protein, 17 aa, synthetic construct
  source 1..17: note = ahCD20_of HCDR2
TISWNSGSIGYADSVKG

SEQ ID NO: 877 - protein, 13 aa, synthetic construct
  source 1..13: note = ahCD20_of HCDR3
DIQYGNYYYGMDV

SEQ ID NO: 878 - protein, 107 aa, synthetic construct; identical to SEQ ID NO: 752
  source 1..107: note = ahCD20_of VL

SEQ ID NO: 879 - protein, 11 aa, synthetic construct
  source 1..11: note = ahCD20_of LCDR1
RASQSVSSYLA

SEQ ID NO: 880 - protein, 7 aa, synthetic construct
  source 1..7: note = ahCD20_of LCDR2
DASNRAT

SEQ ID NO: 881 - protein, 9 aa, synthetic construct
  source 1..9: note = ahCD20_of LCDR3
QQRSNWPIT

1. An antigen binding polypeptide complex comprising a first polypeptide, a second polypeptide, and a third polypeptide;
wherein the first polypeptide has a structure represented by:
VL1-L1-VH1-L2-Fc;
VH1-L3-VL1-L4-Fc;
VH1-L1-VL1-L2-Fc; or
VL1-L3-VH1-L4-Fc;
wherein the second polypeptide has a structure represented by:
VH2-L5-VH3-L6-CH1-L7-Fc; or
VH3-L5-VH2-L6-CH1-L7-Fc;
wherein the third polypeptide has a structure represented by:
VL2-L8-VL3-L9-CL; or
VL3-L8-VL2-L9-CL;
wherein
VL1 is a first immunoglobulin light chain variable region;
VL2 is a second immunoglobulin light chain variable region;
VL3 is a third immunoglobulin light chain variable region;
VH1 is a first immunoglobulin heavy chain variable region;
VH2 is a second immunoglobulin heavy chain variable region;
VH3 is a third immunoglobulin heavy chain variable region;
Fc is a region comprising an immunoglobulin heavy chain constant region 2 (CH2), an immunoglobulin heavy chain constant region 3 (CH3), and optionally, an immunoglobulin hinge;
CH1 is an immunoglobulin heavy chain constant region 1;
CL is an immunoglobulin light chain constant region; and
L1-L9 are amino acid linkers.

2. An antigen binding polypeptide complex according to claim 1 comprising a first polypeptide, a second polypeptide, and a third polypeptide;
wherein the first polypeptide has a structure represented by:
VL1-L1-VH1-L2-Fc; or
VH1-L3-VL1-L4-Fc;
wherein the second polypeptide has a structure represented by:
VH2-L5-VH3-L6-CH1-L7-Fc;
wherein the third polypeptide has a structure represented by:
VL2-L8-VL3-L9-CL;
wherein:
VL1 is a first immunoglobulin light chain variable region;
VL2 is a second immunoglobulin light chain variable region;
VL3 is a third immunoglobulin light chain variable region;
VH1 is a first immunoglobulin heavy chain variable region;
VH2 is a second immunoglobulin heavy chain variable region;
VH3 is a third immunoglobulin heavy chain variable region;
Fc is a region comprising an immunoglobulin heavy chain constant region 2 (CH2), an immunoglobulin heavy chain constant region 3 (CH3), and optionally, an immunoglobulin hinge;
CH1 is an immunoglobulin heavy chain constant region 1;
CL is an immunoglobulin light chain constant region; and
L1-L9 are amino acid linkers.

3. An antigen binding polypeptide complex comprising a first polypeptide, a second polypeptide, a third polypeptide, and a fourth polypeptide;
wherein the first polypeptide has a structure represented by:
VL1-L1-CL; or
VH1-L1-CL;
wherein the second polypeptide has a structure represented by:
VH1-L2-CH1-L3-Fc; or
VL1-L2-CH1-L3-Fc;
wherein the third polypeptide has a structure represented by:
VH2-L4-VH3-L5-CH1-L6-Fc; or
VH3-L4-VH2-L5-CH1-L6-Fc;
wherein the fourth polypeptide has a structure represented by:
VL2-L7-VL3-L8-CL; or
VL3-L7-VL2-L8-CL;
wherein:
VL1 is a first immunoglobulin light chain variable region;
VL2 is a second immunoglobulin light chain variable region;
VL3 is a third immunoglobulin light chain variable region;
VH1 is a first immunoglobulin heavy chain variable region;
VH2 is a second immunoglobulin heavy chain variable region;
VH3 is a third immunoglobulin heavy chain variable region;
Fc is a region comprising an immunoglobulin heavy chain constant region 2 (CH2), an immunoglobulin heavy chain constant region 3 (CH3), and optionally, an immunoglobulin hinge;
CH1 is an immunoglobulin heavy chain constant region 1;
CL is an immunoglobulin light chain constant region; and
L1-L8 are amino acid linkers.

4. An antigen binding polypeptide complex according to claim 3 comprising a first polypeptide, a second polypeptide, a third polypeptide, and a fourth polypeptide;
wherein the first polypeptide has a structure represented by:
VL1-L1-CL;
wherein the second polypeptide has a structure represented by:
VH1-L2-CH1-L3-Fc;
wherein the third polypeptide has a structure represented by:
VH2-L4-VH3-L5-CH1-L6-Fc;
wherein the fourth polypeptide has a structure represented by:
VL2-L7-VL3-L8-CL;
wherein:
VL1 is a first immunoglobulin light chain variable region;
VL2 is a second immunoglobulin light chain variable region;
VL3 is a third immunoglobulin light chain variable region;
VH1 is a first immunoglobulin heavy chain variable region;
VH2 is a second immunoglobulin heavy chain variable region;
VH3 is a third immunoglobulin heavy chain variable region;
Fc is a region comprising an immunoglobulin heavy chain constant region 2 (CH2), an immunoglobulin heavy chain constant region 3 (CH3), and optionally, an immunoglobulin hinge;
CH1 is an immunoglobulin heavy chain constant region 1;
CL is an immunoglobulin light chain constant region; and
L1-L8 are amino acid linkers.

5. An antigen binding polypeptide complex comprising a first polypeptide, a second polypeptide, and a third polypeptide;
wherein the first polypeptide has a structure represented by:
VL1-L1-VL2-L2-VH2-L3-VH1-L4-Fc;
VL1-L1-VH2-L2-VL2-L3-VH1-L4-Fc;
VH1-L5-VH2-L6-VL2-L7-VL1-L8-Fc; or
VH1-L5-VL2-L6-VH2-L7-VL1-L8-Fc;
wherein the second polypeptide has a structure represented by:
VH3-L9-VH4-L10-CH1-L11-Fc; or
VH4-L9-VH3-L10-CH1-L11-Fc;
wherein the third polypeptide has a structure represented by:
VL3-L12-VL4-L13-CL; or
VL4-L12-VL3-L13-CL
wherein:
VL1 is a first immunoglobulin light chain variable region;
VL2 is a second immunoglobulin light chain variable region;
VL3 is a third immunoglobulin light chain variable region;
VL4 is a fourth immunoglobulin light chain variable region;
VH1 is a first immunoglobulin heavy chain variable region;
VH2 is a second immunoglobulin heavy chain variable region;
VH3 is a third immunoglobulin heavy chain variable region;
VH4 is a fourth immunoglobulin heavy chain variable region;
Fc is a region comprising an immunoglobulin heavy chain constant region 2 (CH2), an immunoglobulin heavy chain constant region 3 (CH3), and optionally, an immunoglobulin hinge;
CH1 is an immunoglobulin heavy chain constant region 1;
CL is an immunoglobulin light chain constant region; and
L1-L13 are amino acid linkers;
or
wherein the first polypeptide has a structure represented by:
VL1-L1-VL2-L2-VH2-L3-VH1-L4-Fc;
VL1-L1-VH2-L2-VL2-L3-VH1-L4-Fc;
VH1-L5-VH2-L6-VL2-L7-VL1-L8-Fc; or
VH1-L5-VL2-L6-VH2-L7-VL1-L8-Fc;
wherein the second polypeptide has a structure represented by:
VH3-L9-VH4-CH1-Fc; or
VH4-L9-VH3-CH1-Fc;
wherein the third polypeptide has a structure represented by:
VL3-L12-VL4-CL; or
VL4-L12-VL3-CL
wherein:
VL1 is a first immunoglobulin light chain variable region;
VL2 is a second immunoglobulin light chain variable region;
VL3 is a third immunoglobulin light chain variable region;
VL4 is a fourth immunoglobulin light chain variable region;
VH1 is a first immunoglobulin heavy chain variable region;
VH2 is a second immunoglobulin heavy chain variable region;
VH3 is a third immunoglobulin heavy chain variable region;
VH4 is a fourth immunoglobulin heavy chain variable region;
Fc is a region comprising an immunoglobulin heavy chain constant region 2 (CH2), an immunoglobulin heavy chain constant region 3 (CH3), and optionally, an immunoglobulin hinge;
CH1 is an immunoglobulin heavy chain constant region 1;
CL is an immunoglobulin light chain constant region; and
L1-L10 are amino acid linkers.

6. An antigen binding polypeptide complex according to claim 5 comprising a first polypeptide, a second polypeptide, and a third polypeptide;
wherein the first polypeptide has a structure represented by:
VL1-L1-VL2-L2-VH2-L3-VH1-L4-Fc; or
VH1-L5-VH2-L6-VL2-L7-VL1-L8-Fc;
wherein the second polypeptide has a structure represented by:
VH3-L9-VH4-L10-CH1-L11-Fc;
wherein the third polypeptide has a structure represented by:
VL3-L12-VL4-L13-CL;
wherein:
VL1 is a first immunoglobulin light chain variable region;
VL2 is a second immunoglobulin light chain variable region;
VL3 is a third immunoglobulin light chain variable region;
VL4 is a fourth immunoglobulin light chain variable region;
VH1 is a first immunoglobulin heavy chain variable region;
VH2 is a second immunoglobulin heavy chain variable region;
VH3 is a third immunoglobulin heavy chain variable region;
VH4 is a fourth immunoglobulin heavy chain variable region;
Fc is a region comprising an immunoglobulin heavy chain constant region 2 (CH2), an immunoglobulin heavy chain constant region 3 (CH3), and optionally, an immunoglobulin hinge;
CH1 is an immunoglobulin heavy chain constant region 1;
CL is an immunoglobulin light chain constant region; and
L1-L13 are amino acid linkers;
or
wherein the first polypeptide has a structure represented by:
VL1-L1-VL2-L2-VH2-L3-VH1-L4-Fc; or
VH1-L5-VH2-L6-VL2-L7-VL1-L8-Fc;
wherein the second polypeptide has a structure represented by:
VH3-L9-VH4-CH1-Fc;
wherein the third polypeptide has a structure represented by:
VL3-L10-VL4-CL;
wherein:
VL1 is a first immunoglobulin light chain variable region;
VL2 is a second immunoglobulin light chain variable region;
VL3 is a third immunoglobulin light chain variable region;
VL4 is a fourth immunoglobulin light chain variable region;
VH1 is a first immunoglobulin heavy chain variable region;
VH2 is a second immunoglobulin heavy chain variable region;
VH3 is a third immunoglobulin heavy chain variable region;
VH4 is a fourth immunoglobulin heavy chain variable region;
Fc is a region comprising an immunoglobulin heavy chain constant region 2 (CH2), an immunoglobulin heavy chain constant region 3 (CH3), and optionally, an immunoglobulin hinge;
CH1 is an immunoglobulin heavy chain constant region 1;
CL is an immunoglobulin light chain constant region; and
L1-L10 are amino acid linkers.

7. An antigen binding polypeptide complex comprising a first polypeptide and a second polypeptide;
wherein the first polypeptide has a structure represented by:
VL1-L1-VL2-L2-VH2-L3-VH1-L4-Fc;
VL1-L1-VH2-L2-VL2-L3-VH1-L4-Fc;
VH1-L5-VH2-L6-VL2-L7-VL1-L8-Fc; or
VH1-L5-VL2-L6-VH2-L7-VL1-L8-Fc;
wherein the second polypeptide has a structure represented by:
VL3-L9-VL4-L10-VH4-L11-VH3-L12-Fc;
VL3-L9-VH4-L10-VL4-L11-VH3-L12-Fc;
VH3-L13-VH4-L14-VL4-L15-VL3-L16-Fc; or
VH3-L13-VL4-L14-VH4-L15-VL3-L16-Fc;
wherein:
VL1 is a first immunoglobulin light chain variable region that specifically binds to a tumor-associated antigen;
VL2 is a second immunoglobulin light chain variable region that specifically binds to a tumor-associated antigen;
VL3 is a third immunoglobulin light chain variable region that specifically binds to CD3;
VL4 is a fourth immunoglobulin light chain variable region that specifically binds to a tumor-associated antigen;
VH1 is a first immunoglobulin heavy chain variable region that specifically binds to a tumor-associated antigen;
VH2 is a second immunoglobulin heavy chain variable region that specifically binds to a tumor-associated antigen;
VH3 is a third immunoglobulin heavy chain variable region that specifically binds to CD3;
VH4 is a fourth immunoglobulin heavy chain variable region that specifically binds to a tumor-associated antigen;
Fc is a region comprising an immunoglobulin heavy chain constant region 2 (CH2), an immunoglobulin heavy chain constant region 3 (CH3), and optionally, an immunoglobulin hinge; and
L1-L16 are amino acid linkers.

8. An antigen binding polypeptide complex according to claim 7 comprising a first polypeptide and a second polypeptide;
wherein the first polypeptide has a structure represented by:
VL1-L1-VL2-L2-VH2-L3-VH1-L4-Fc; or
VH1-L5-VH2-L6-VL2-L7-VL1-L8-Fc;
wherein the second polypeptide has a structure represented by:
VL3-L9-VL4-L10-VH4-L11-VH3-L12-Fc; or
VH3-L13-VH4-L14-VL4-L15-VL3-L16-Fc;
wherein:
VL1 is a first immunoglobulin light chain variable region that specifically binds to a tumor-associated antigen;
VL2 is a second immunoglobulin light chain variable region that specifically binds to a tumor-associated antigen;
VL3 is a third immunoglobulin light chain variable region that specifically binds to CD3;
VL4 is a fourth immunoglobulin light chain variable region that specifically binds to a tumor-associated antigen;
VH1 is a first immunoglobulin heavy chain variable region that specifically binds to a tumor-associated antigen;
VH2 is a second immunoglobulin heavy chain variable region that specifically binds to a tumor-associated antigen;
VH3 is a third immunoglobulin heavy chain variable region that specifically binds to CD3;
VH4 is a fourth immunoglobulin heavy chain variable region that specifically binds to a tumor-associated antigen;
Fc is a region comprising an immunoglobulin heavy chain constant region 2 (CH2), an immunoglobulin heavy chain constant region 3 (CH3), and optionally, an immunoglobulin hinge; and
L1-L16 are amino acid linkers.

9. An antigen binding polypeptide complex comprising a first polypeptide and a second polypeptide;
wherein the first polypeptide has a structure represented by:
VL1-L1-VL2-L2-VH2-L3-VH1-L4-CH1-L5-Fc;
VL1-L1-VH2-L2-VL2-L3-VH1-L4-CH1-L5-Fc;
VH1-L6-VH2-L7-VL2-L8-VL1-L9-CH1-L10-Fc;
VH1-L6-VL2-L7-VH2-L8-VL1-L9-CH1-L10-Fc;
VL1-L11-VL2-L12-VH2-L13-VH1-L14-CL-L15-Fc;
VL1-L11-VH2-L12-VL2-L13-VH1-L14-CL-L15-Fc;
VH1-L16-VH2-L17-VL2-L18-VL1-L19-CL-L20-Fc;
VH1-L16-VL2-L17-VH2-L18-VL1-L19-CL-L20-Fc;
VL1-L21-VL2-L22-VH2-L23-VH1-L24-CH1-L25-CL-L26-Fc;
VL1-L21-VH2-L22-VL2-L23-VH1-L24-CH1-L25-CL-L26-Fc;
VH1-L27-VH2-L28-VL2-L29-VL1-L30-CH1-L31-CL-L32-Fc;
VH1-L27-VL2-L28-VH2-L29-VL1-L30-CH1-L31-CL-L32-Fc;
VL1-L33-VL2-L34-VH2-L35-VH1-L36-CL-L37-CH1-L38-Fc;
VL1-L33-VH2-L34-VL2-L35-VH1-L36-CL-L37-CH1-L38-Fc;
VH1-L39-VH2-L40-VL2-L41-VL1-L42-CL-L43-CH1-L44-Fc; or
VH1-L39-VL2-L40-VH2-L41-VL1-L42-CL-L43-CH1-L44-Fc;
wherein the second polypeptide has a structure represented by:
VL3-L45-VL4-L46-VH4-L47-VH3-L48-CH1-L49-Fc;
VL3-L45-VH4-L46-VL4-L47-VH3-L48-CH1-L49-Fc;
VH3-L50-VH4-L51-VL4-L52-VL3-L53-CH1-L54-Fc;
VH3-L50-VL4-L51-VH4-L52-VL3-L53-CH1-L54-Fc;
VL3-L55-VL4-L56-VH4-L57-VH3-L58-CL-L59-Fc;
VL3-L55-VH4-L56-VL4-L57-VH3-L58-CL-L59-Fc;
VH3-L60-VH4-L61-VL4-L62-VL3-L63-CL-L64-Fc;
VH3-L60-VL4-L61-VH4-L62-VL3-L63-CL-L64-Fc;
VL3-L65-VL4-L66-VH4-L67-VH3-L68-CH1-L69-CL-L70-Fc;
VL3-L65-VH4-L66-VL4-L67-VH3-L68-CH1-L69-CL-L70-Fc;
VH3-L71-VH4-L72-VL4-L73-VL3-L74-CH1-L75-CL-L76-Fc;
VH3-L71-VL4-L72-VH4-L73-VL3-L74-CH1-L75-CL-L76-Fc;
VL3-L77-VL4-L78-VH4-L79-VH3-L80-CL-L81-CH1-L82-Fc;
VL3-L77-VH4-L78-VL4-L79-VH3-L80-CL-L81-CH1-L82-Fc;
VH3-L83-VH4-L84-VL4-L85-VL3-L86-CL-L87-CH1-L88-Fc; or
VH3-L83-VL4-L84-VH4-L85-VL3-L86-CL-L87-CH1-L88-Fc;
wherein:
VL1 is a first immunoglobulin light chain variable region that specifically binds to a tumor-associated antigen;
VL2 is a second immunoglobulin light chain variable region that specifically binds to a tumor-associated antigen;
VL3 is a third immunoglobulin light chain variable region that specifically binds to CD3;
VL4 is a fourth immunoglobulin light chain variable region that specifically binds to a tumor-associated antigen;
VH1 is a first immunoglobulin heavy chain variable region that specifically binds to a tumor-associated antigen;
VH2 is a second immunoglobulin heavy chain variable region that specifically binds to a tumor-associated antigen;
VH3 is a third immunoglobulin heavy chain variable region that specifically binds to CD3;
VH4 is a fourth immunoglobulin heavy chain variable region that specifically binds to a tumor-associated antigen;
Fc is a region comprising an immunoglobulin heavy chain constant region 2 (CH2), an immunoglobulin heavy chain constant region 3 (CH3), and optionally, an immunoglobulin hinge;
CH1 is an immunoglobulin heavy chain constant region 1;
CL is an immunoglobulin light chain constant region; and
L1-L88 are amino acid linkers.

10. An antigen binding polypeptide complex according to claim 9 comprising a first polypeptide and a second polypeptide;
wherein the first polypeptide has a structure represented by:
VL1-L1-VL2-L2-VH2-L3-VH1-L4-CH1-L5-Fc;
VH1-L6-VH2-L7-VL2-L8-VL1-L9-CH1-L10-Fc;
VL1-L11-VL2-L12-VH2-L13-VH1-L14-CL-L15-Fc;
VH1-L16-VH2-L17-VL2-L18-VL1-L19-CL-L20-Fc;
VL1-L21-VL2-L22-VH2-L23-VH1-L24-CH1-L25-CL-L26-Fc;
VH1-L27-VH2-L28-VL2-L29-VL1-L30-CH1-L31-CL-L32-Fc;
VL1-L33-VL2-L34-VH2-L35-VH1-L36-CL-L37-CH1-L38-Fc; or
VH1-L39-VH2-L40-VL2-L41-VL1-L42-CL-L43-CH1-L44-Fc;
wherein the second polypeptide has a structure represented by:
VL3-L45-VL4-L46-VH4-L47-VH3-L48-CH1-L49-Fc;
VH3-L50-VH4-L51-VL4-L52-VL3-L53-CH1-L54-Fc;
VL3-L55-VL4-L56-VH4-L57-VH3-L58-CL-L59-Fc;
VH3-L60-VH4-L61-VL4-L62-VL3-L63-CL-L64-Fc;
VL3-L65-VL4-L66-VH4-L67-VH3-L68-CH1-L69-CL-L70-Fc;
VH3-L71-VH4-L72-VL4-L73-VL3-L74-CH1-L75-CL-L76-Fc;
VL3-L77-VL4-L78-VH4-L79-VH3-L80-CL-L81-CH1-L82-Fc; or
VH3-L83-VH4-L84-VL4-L85-VL3-L86-CL-L87-CH1-L88-Fc;
wherein:
VL1 is a first immunoglobulin light chain variable region that specifically binds to a tumor-associated antigen;
VL2 is a second immunoglobulin light chain variable region that specifically binds to a tumor-associated antigen;
VL3 is a third immunoglobulin light chain variable region that specifically binds to CD3;
VL4 is a fourth immunoglobulin light chain variable region that specifically binds to a tumor-associated antigen;
VH1 is a first immunoglobulin heavy chain variable region that specifically binds to a tumor-associated antigen;
VH2 is a second immunoglobulin heavy chain variable region that specifically binds to a tumor-associated antigen;
VH3 is a third immunoglobulin heavy chain variable region that specifically binds to CD3;
VH4 is a fourth immunoglobulin heavy chain variable region that specifically binds to a tumor-associated antigen;
Fc is a region comprising an immunoglobulin heavy chain constant region 2 (CH2), an immunoglobulin heavy chain constant region 3 (CH3), and optionally, an immunoglobulin hinge;
CH1 is an immunoglobulin heavy chain constant region 1;
CL is an immunoglobulin light chain constant region; and
L1-L88 are amino acid linkers.

11. The antigen binding polypeptide complex of claim 7, wherein one or more linkers L1-L16 has a length of from 0 amino acids to about 50 amino acids.

12-13. (canceled)

14. The antigen binding polypeptide complex of claim 7, wherein one or more linkers L1-L16 is a cleavable linker.

15. The antigen binding polypeptide complex of claim 14, wherein the cleavable linker is cleaved by a matrix metalloprotease (MMP), a type II transmembrane serine protease, or a MMP and a type II transmembrane serine protease.

16-19. (canceled)

20. The antigen binding polypeptide complex of claim 14, wherein the cleavable linker is GPAALV, GSGRKG, GPLGLTG, GPSGLVG, GLVGRKAG, GPAGLVG, GPAGLVSG, STRKAGG, ASTRKAG, or ASTRKAGG (SEQ ID NOs:22-31), or a sequence having at least 50%, at least 60%, at least 70%, at least 80%, at least 90%, or at least 95% identity to any one of SEQ ID NOs:22-31.

21. The antigen binding polypeptide complex of claim 7, wherein one or more of linkers L1-L16 comprise the amino acid sequence of g, a, gss, asg, ggssg, gssgs, gtvaa, asggs, astgg, ggsgs, asggsg, ggsgssg, ggsggssgss, sggsgssggs, ggsggsgsgggsasgsg, ggsggsgsggggsasgsg, gggssggggsggsgsggsgs, ggggsggsgsggggsasgsg, gggssggsgsggsgsggsgs, sggssggsgsggsgsggsgssg, gsgssggggsggsgsggsgssg, ggggsgsggsgggssggggsggggsggggsggggsggggs, ggggsggggsggggsggggsggggsggggsggggsggggs, ggggsgsggsgggssggggsggggsggggsggggsggggssss, or ggggsgsggsgggssggggsggggsggggsggggsggggssssgs (SEQ ID NOs:1-21), any one of SEQ ID NOs:444, 567, 576 (GGS) and 607, or a sequence having at least 50%, at least 60%, at least 70%, at least 80%, at least 90%, or at least 95% identity to any one of SEQ ID NOs:1-21 and 444, 567, 576 (GGS) and 607.

22-23. (canceled)

24. The antigen binding polypeptide complex of claim 7, wherein VH1 and VL1, VH2 and VL2, VH3 and VL3, or VH4 and VL4 specifically binds to CD3.

25. The antigen binding polypeptide complex of claim 24,
wherein the VH1, VH2, VH3 or VH4 that specifically binds to CD3 comprises a CDR1 comprising an amino acid sequence having at least 90% identity, at least 95% identity, or 100% identity to any one of SEQ ID NOs:32, 40, 96, 433, 524, 667, 703, 739, 767, 803. 839, 851 and 859; a CDR2 comprising an amino acid sequence having at least 90% identity, at least 95% identity, or 100% identity to any one of SEQ ID NOs:33, 41, 97, 434, 525, 668, 704, 740, 768, 804, 840, 852 and 860; and a CDR3 comprising an amino acid sequence having at least 90% identity, at least 95% identity, or 100% identity to any one of SEQ ID NOs:34, 42, 98, 435, 526, 669, 705, 741, 769, 805, 841, 853 and 861; and
wherein the VL1, VL2, VL3 or VL4 that specifically binds to CD3 comprises a CDR1 comprising an amino acid sequence having at least 90% identity, at least 95% identity, or 100% identity to any one of SEQ ID NOs:35, 44, 99, 446, 456, 466, 476, 520, 663, 699, 735, 763, 799, 835, 855 and 863; a CDR2 comprising an amino acid sequence having at least 90% identity, at least 95% identity, or 100% identity to any one of SEQ ID NOs:36, 45, 100, 447 (DT), 457 (DT), 467 (DT), 477 (DT), 521, 664, 700, 736, 764, 800, 836, 856 and 864; and a CDR3 comprising an amino acid sequence having at least 90% identity, at least 95% identity, or 100% identity to any one of SEQ ID NOs:37, 46, 101, 448, 458, 468, 478, 522, 665, 701, 737, 765, 801, 837, 857 and 865.

26. The antigen binding polypeptide complex of claim 24, wherein the VH1, VH2, VH3 or VH4 that specifically binds to CD3 comprises an amino acid sequence having at least 80%, at least 85%, at least 90%, at least 95%, or 100% identity to any one of SEQ ID NOs:38, 43, 102, 423, 432, 523, 666, 702, 738, 766, 802, 838, 850 and 858, and the VL1, VL2, VL3 or VL4 that specifically binds to CD3 comprises an amino acid sequence having at least 80%, at least 85%, at least 90%, at least 95%, or 100% identity to any one of SEQ ID NOs:39, 47, 103, 422, 445, 455, 465, 475, 519, 662, 698, 734, 762, 798, 834, 854 and 862.

27-28. (canceled)

29. The antigen binding polypeptide complex of claim 7, wherein VH1 and VL1, VH2 and VL2, VH3 and VL3, and/or VH4 and VL4 specifically binds to a TAA.

30. The antigen binding polypeptide complex of claim 29, wherein the TAA is A2AR, APRIL, ATPDase, BAFF, BAFFR, BCMA, BlyS, BTK, BTLA, B7DC, B7H1, B7H2, B7H3, B7H4, B7H5, B7H6, B7H7, B7RP1, B7-4, C3, C5, CCL2, CCL3, CCL4, CCL5, CCL7, CCL8, CCL11, CCL15, CCL17, CCL19, CCL20, CCL21, CCL25, CCR3, CCR4, CD16A, CD19, CD20, CD24, CD27, CD28, CD30, CD38, CD39, CD40, CD40L, CD47, CD52, CD70, CD80, CD86, CD123, CD133, CD137, CD137L, CD160, CD272, CEACAM5, CLEC9, CLEC91, CRTH2, CSF-1, CSF-2, CSF-3, CXCL1, CXCL2, CXCL4, CXCL12, CXCL13, CXCR3, cMet, CTLA4, DLL3, DLL4, DNGR-1, E-cadherin, EGFR, ENTPD1, EpCAM, FCER1, FCER1A, FCER2, FGFR, FLAP, FOLH1, Gi24, GITR, GITRL, GPR5, GP100, GPRC5D, HER2, HER3, ICOSL, ICOS, HHLA2, HMGB1, HVEM, IDO, IFNa, IgE, IGF1R, IL2Rbeta, IL1, ILIA, IL1B, IL1F10, IL2, IL4, IL4Ra, IL5, IL5R, IL6, IL7, IL7Ra, IL8, IL9, IL9R, IL10, rhILlO, IL12, IL13, IL13Ra1, IL13Ra2, IL15, IL17, IL17Rb, IL18, IL22, IL23, IL25, IL7, IL33, IL35, ITGB4, ITK, KIR, LAG3, LAMP1, leptin, LPFS2, MHC class II, MUC-1, MUC-16, NCR3LG1, NKG2D, NKp46, NTPDase-1, OX40, OX40L, PD-1, PD-L1, PD-L2, PROM1, S152, SIRPalpha, SISP1, SLC, SPG64, ST2, STEAP1, STEAP2, Syk kinase, STEAP1, TROP2, TACI, TDO, TGFBETA, T14, TIGIT, TIM3, TLR, TLR2, TLR4, TLR5, TLR9, TMEF1, TNFa, TNFRSF7, Tp55, TREM1, TSLP, TSLPR, TWEAK, VEGF, VISTA, Vstm3, or WUCAM.

31. The antigen binding polypeptide complex of claim 29,
wherein the one or more of VH1, VH2, VH3 or VH4 that specifically binds to a TAA comprises a CDR1 comprising an amino acid sequence having at least 90% identity, at least 95% identity, or 100% identity to any one of SEQ ID NOs:64, 72, 80, 8104, 112, 120, 128, 389, 409, 419, 429, 659, 695, 731, 397, 508, 540, 552, 757, 793, 829, 875, 500, 749, 785, 821, 649, 685, 775, 847, 625, 641, 677, 713 and 867; a CDR2 comprising an amino acid sequence having at least 90% identity, at least 95% identity, or 100% identity to any one of SEQ ID NOs:65, 73, 81, 89, 105, 113, 121, 129, 390, 410, 420, 430, 660, 696, 732, 398, 509, 541, 553, 758, 794, 830, 876, 501, 750, 786, 822, 650, 686, 776, 848, 626, 642, 678, 714 and 868; and a CDR3 comprising an amino acid sequence having at least 90% identity, at least 95% identity, or 100% identity to any one of SEQ ID NOs:66, 74, 82, 90, 106, 114, 122, 130, 391, 411, 421, 431, 661, 697, 733, 399, 510, 542, 554, 759, 795, 831, 877, 502, 751, 787, 823, 651, 687, 777, 849, 627, 643, 679, 715 and 869; and
wherein the one or more of VL1, VL2, VL3 or VL4 that specifically binds to a TAA comprises a CDR1 comprising an amino acid sequence having at least 90% identity, at least 95% identity, or 100% identity to any one of SEQ ID NOs:67, 75, 83, 91, 107, 115, 123, 131, 385, 405, 415, 441, 452, 462, 472, 655, 691, 727, 393, 486, 504, 536, 548, 753, 789, 825, 871, 879, 490, 496, 745, 781, 817, 645, 681, 771, 843, 621, 637, 673, 709 and 871; a CDR2 comprising an amino acid sequence having at least 90% identity, at least 95% identity, or 100% identity to any one of SEQ ID NOs:68, 76, 84, 92, 108, 116, 124, 132, 386 (YTS); 406 (YTS), 416 (YTS), 442 (YTS), 453 (YTS), 463 (YTS), 473 (YTS), 656, 692, 728, 394, 487 (AT), 505 (AT), 537, 549, 754, 790, 826, 872, 880, 491 (DA), 497 (DA), 746, 782, 818, 646, 682, 772, 844, 622, 638, 674, 710 and 872; and a CDR3 comprising an amino acid sequence having at least 90% identity, at least 95% identity, or 100% identity to any one of SEQ ID NOs:69, 77, 85, 93, 109, 117, 125, 133, 387, 407, 417, 443, 454, 464, 474, 657, 693, 729, 395, 488, 506, 538, 550, 755, 791, 827, 873, 881, 492, 498, 747, 783, 819, 647, 683, 773, 845, 623, 639, 675, 711 and 873.

32. The antigen binding polypeptide complex of claim 29, wherein the one or more of VH1, VH2, VH3 or VH4 that specifically binds to a TAA comprises an amino acid sequence having at least 80%, at least 85%, at least 90%, at least 95%, or 100% identity to any one of SEQ ID NOs:70, 78, 86, 94, 102, 110, 118, 126, 134, 388, 408, 418, 428, 584, 658, 694, 730, 396, 403, 507, 539, 551, 756, 792, 883, 828, 866, 874, 499, 544, 556, 748, 784, 820, 528, 648, 684, 774, 846, 624, 640, 676 and 712; and the one or more of VL1, VL2, VL3 or VL4 that specifically binds to a TAA comprises an amino acid sequence having at least 80%, at least 85%, at least 90%, at least 95%, or 100% identity to any one of SEQ ID NOs:71, 79, 87, 95, 103, 111, 119, 127, 135, 384, 404, 414, 440, 451, 461, 471, 583, 654, 690, 726, 392, 402, 485, 503, 535, 547, 752, 788, 824, 882, 870, 878, 489, 495, 543, 555, 744, 780, 816, 527, 644, 680, 770, 842, 620, 636, 672 and 708.

33-34. (canceled)

35. The antigen binding polypeptide complex of claim 7, wherein VH1 and VL1, VH2 and VL2, VH3 and VL3, and/or VH4 and VL4 specifically binds to an immune stimulating receptor.

36. The antigen binding polypeptide complex of claim 35, wherein the immune stimulating receptor is CD28.

37. The antigen binding polypeptide complex of claim 35,
wherein the VH1, VH2, VH3 or VH4 that specifically binds to an immune stimulating receptor comprises a CDR1 comprising an amino acid sequence having at least 90% identity, at least 95% identity, or 100% identity to any one of SEQ ID NOs:48, 56, 649, 685, 775, 847, 721 and 811; a CDR2 comprising an amino acid sequence having at least 90% identity, at least 95% identity, or 100% identity to any one of SEQ ID NOs:49, 57, 650, 686, 776, 848, 722 and 812; and a CDR3 comprising an amino acid sequence having at least 90% identity, at least 95% identity, or 100% identity to any one of SEQ ID NOs:50, 58, 651, 687, 777, 849, 723 and 813; and
wherein the VL1, VL2, VL3 or VL4 that specifically binds to an immune stimulating receptor comprises a CDR1 comprising an amino acid sequence having at least 90% identity, at least 95% identity, or 100% identity to any one of SEQ ID NOs:51, 59, 645, 681, 771, 843, 717 and 807; a CDR2 comprising an amino acid sequence having at least 90% identity, at least 95% identity, or 100% identity to any one of SEQ ID NOs:52, 60, 646, 682, 772, 844, 718 and 808; and a CDR3 comprising an amino acid sequence having at least 90% identity, at least 95% identity, or 100% identity to any one of SEQ ID NOs:53, 61, 647, 683, 773, 845, 719 and 809.

38. The antigen binding polypeptide complex of claim 35, wherein the VH1, VH2, VH3 or VH4 that specifically binds to an immune stimulating receptor comprises an amino acid sequence having at least 80%, at least 85%, at least 90%, at least 95%, or 100% identity to any one of SEQ ID NOs:54, 62, 528, 648, 684, 774 and 846, and the VL1, VL2, VL3 or VL4 that specifically binds to an immune stimulating receptor comprises an amino acid sequence having at least 80%, at least 85%, at least 90%, at least 95%, or 100% identity to any one of SEQ ID NOs:55, 63, 527, 644, 680, 770 and 842.

39. The antigen binding polypeptide complex of claim 1, wherein L5, L8, or L5 and L8 are cleavable linkers.

40. The antigen binding polypeptide complex of claim 39, wherein VH3 and VL3 specifically bind to CD3.

41. The antigen binding polypeptide complex of claim 39, wherein VH1 and VL1 and/or VH2 and VL2 specifically bind to a TAA.

42. The antigen binding polypeptide complex of claim 39, wherein VH1 and VL1 or VH2 and VL2 specifically bind to CD28.

43. The antigen binding polypeptide complex of claim 3, wherein L4, L7, or L4 and L7 are cleavable linkers.

44. The antigen binding polypeptide complex of claim 43, wherein VH3 and VL3 specifically bind to CD3.

45. The antigen binding polypeptide complex of claim 43, wherein VH1 and VL1 and/or VH2 and VL2 specifically bind to a TAA.

46. The antigen binding polypeptide complex of claim 43, wherein VH1 and VL1 or VH2 and VL2 specifically bind to CD28.

47. The antigen binding polypeptide complex of claim 5, wherein L9, L12, or L9 and L12 are cleavable linkers.

48. The antigen binding polypeptide complex of claim 47, wherein VH4 and VL4 specifically bind to CD3.

49. The antigen binding polypeptide complex of claim 47, wherein one or more of VH1 and VL1, VH2 and VL2, and VH3 and VL3 specifically bind to a TAA.

50. The antigen binding polypeptide complex of claim 47, wherein VH1 and VL1 specifically bind to a TAA, VH2 and VL2 specifically bind to a TAA, and VH3 and VL3 specifically bind to CD28.

51. The antigen binding polypeptide complex of claim 47, wherein VH1 and VL1 specifically bind to CD28, VH2 and VL2 specifically bind to a TAA, and VH3 and VL3 specifically bind to a TAA.

52. The antigen binding polypeptide complex of claim 47, wherein VH1 and VL1 specifically bind to cMet, VH2 and VL2 specifically bind to Trop2, and VH3 and VL3 specifically bind to CD28.

53. The antigen binding polypeptide complex of claim 47, wherein VH1 and VL1 specifically bind to Trop2, VH2 and VL2 specifically bind to cMet, and VH3 and VL3 specifically bind to CD28.

54. The antigen binding polypeptide complex of claim 47, wherein VH1 and VL1 specifically bind to cMet, VH2 and VL2 specifically bind to CD28, and VH3 and VL3 specifically bind to Trop2.

55. The antigen binding polypeptide complex of claim 47, wherein VH1 and VL1 specifically bind to CD28, VH2 and VL2 specifically bind to cMet, and VH3 and VL3 specifically bind to Trop2.

56. The antigen binding polypeptide complex of claim 47, wherein VH1 and VL1 specifically bind to Trop2, VH2 and VL2 specifically bind to CD28, and VH3 and VL3 specifically bind to cMet.

57. The antigen binding polypeptide complex of claim 47, wherein VH1 and VL1 specifically bind to CD28, VH2 and VL2 specifically bind to Trop2, and VH3 and VL3 specifically bind to cMet.

58. The antigen binding polypeptide complex of claim 7, wherein L1, L3, or L1 and L3 are cleavable linkers, or L5, L7, or L5 and L7 are cleavable linkers.

59. The antigen binding polypeptide complex of claim 7, wherein L9, L11, or L9 and L11 are cleavable linkers, or L13, L15, or L13 and L15 are cleavable linkers.

60. The antigen binding polypeptide complex of claim 58, wherein VH1 and VL1, VH2 and VL2, VH3 and VL3, or VH4 and VL4 specifically bind to CD3.

61. The antigen binding polypeptide complex of claim 58, wherein one or more of VH1 and VL1, VH2 and VL2, VH3 and VL3, and VH4 and VL4 specifically bind to a TAA.

62. The antigen binding polypeptide complex of claim 58, wherein VH1 and VL1, VH2 and VL2, VH3 and VL3, or VH4 and VL4 specifically bind to CD28.

63. (canceled)

64. The antigen binding polypeptide complex of claim 7, wherein the immunoglobulin hinge comprises an upper hinge region, a middle hinge region, a lower hinge region, or a combination thereof.

65. The antigen binding polypeptide complex of claim 7, wherein the Fc region comprises at least one knob-into-hole modification.

66. The antigen binding polypeptide complex of claim 65, wherein the antigen binding polypeptide complex is an IgG1 or IgG4 antibody and the knob-into-hole modification comprises:
(i) knob substitutions of S354C and T366W and hole substitutions of Y349C, T366S, L368A and Y407V;
(ii) hole substitutions of L234A, L235A and P329A;
(iii) hole substitutions of L234A and L235A;
(iv) hole substitutions of M428L and N433S;
(v) hole substitutions of M252Y, S254T and T256E; or
(vi) a combination thereof;
based on the EU numbering scheme.

67. An antibody or antigen binding fragment thereof comprising the antigen binding polypeptide complex of claim 7.

68. A pharmaceutical composition comprising the antigen binding polypeptide complex of claim 7, and a pharmaceutically acceptable carrier.

69. A kit comprising an antigen binding polypeptide complex of claim 7, and instructions for use.

70. A method for treating cancer, comprising administering to a subject in need thereof the antigen binding polypeptide complex of claim 7.

71-75. (canceled)
